United States Patent Application Publication US 2025/0295137 A1 - sequence listing, part 4

SEQ ID NO: 4 - DNA, 1982252 bp, Latilactobacillus sakei
  source 1..1982252: mol_type = genomic DNA
cgtggcaacgtcctatcctcgcaggtagtttcccaccaactactatcggcgctaagaagcttaactactgtgttcgacatgggaacaggtgtatccttcttgctatcgccaccacactattttgtgctttcgcactgagaagaacttcgttctctcaaaactgcataataagtaatattttcatttcaaaagccaaacattgcacctttggttaagtcctcgaccgattagtactagtccgctccatacatcgctgtacttccactcctagcctatctacctgatcatctttcaggggtcttacttccataaaggaatgggaaatctcatctcgaggggggcttcacacttagatgctttcagcgtttatccctgccatacatagctacccagcgatgcgcctggcggcacaactggtacaccagaggtatgtccatcccggtcctctcgtactaaggacagctcctctcaaatttcctgcgcccgcgacggatagggaccgaactgtctcacgacgttctgaacccagctcgcgtaccgctttaatgggcgaacagcccaacccttgggaccgactacagccccaggatgcgatgagccgacatcgaggtgccaaacctccccgtcgatgtggactcttgggggagataagcctgttatccccagggtagcttttatccgttgagcgatggcccttccatacggaaccaccggatcactaagtccgactttcgtccctgctcgatttgtcaatctcacagtcaagctctcttatacctttacactctacgaatgatttccaaccattctgagagaacctttgagcgcctccgttacactttaggaggcgaccgccccagtcaaactgcccacctgacactgtctcccgccacgctaagtggcgcgggttagagtggtcatacagttagggtagtatcccaccaacgcctcaatcgaaactagcgttccgatttctacggctcctacctatcctgtacaaactgtacaaacactcaatatcaagctacagtaaagctccatggggtctttccgtcctgtcgcgggtaacccgcatcttcacgggtattataatttcaccgagtctctcgttgagacagtgcccaaatcattacgcctttcgtgcgggtcggaacttacccgacaaggaatttcgctaccttaggaccgttatagttacggccgccgtttactggggcttcaattctgggcttcgcttgcgctaactcatcctcttaaccttccagcaccgggcaggcgtcagcccctatacgtcatcttacgattttgcagagacctgtgtttttgataaacagttgtttgggcctattcactgcggctgacctgacggtcagcaccccttctcccgaagttacggggtcattttgccgagttccttaacgagagttcactcgctcaccttaggatattctcctcgaccacctgtgtcggtttacggtacgggtagtttatttctcactagaagcttttcttggcagtgtaacatcaggaacttcgctacttaatttcgctccccatcacaacttgtccttaaagaatcaagcatttcactcaactcaagacttgttgcttggacacacatttccagtcgtgtgcattccttagcttcctgcgtccctccatcattcaaacaaaataaactagtacaggaatatcaacctgttatccatcgactacgcctctcggcctcgccttaggtcccgactaaccctgggaggacgagccttccccaggaaaccttagtcatacggtggatcagattctcactgatctttcgctactcatgccggcattctcacttctaagcgctccactagtccttacgatctagcttcatcgcccttagaacgctctcctaccgcggacacttacgtgtccacccacagtttcggtattatgtttagccccggtacattttcggcgcagcggcactcgactagtgagctattacgcactctttaaatggtggctgcttctgagccaacatcctagttgtctgtgcaccgccacatccttttccacttaacataaattttgggaccttaactggtgatctgggctgtttccctttcgactacggatcttatcactcgcagtctgactcccggaactaaatcaatggtattcggagtttatctgaattcagtaacccatgacgggcccctagtccaaacagtgctctacctccatgatccaatattccgaggctagccctaaagctatttcggagagaaccagctatctccaagttcgattggaatttcaccgctacccacacctcatccccgccattttcaactgacgtgggttcggtcctccagtgtgttttaccacaccttcaacctggacatgggtaggtcacttggtttcgggtctacatctatatactcactcgcccatttcagactcgctttcgctacggctccagcttttcactttaacctcgcatataaacgtaactcgccggttcattctacaaaaggcacgccatcactcattaacgagctttgactaattgtaggcacatggtttcaggatctatttcactccccttccggggtgcttttcacctttccctcacggtactggttcactatcggtcactagggagtatttagccttgggagatggtcctcccggattccgacggaatttcacgtgttccgccgtactcaggatccagaacggaggtcaagttgtttaatctacgtggttatcacactctttgactcagcttcccagctgattcgattacaacttaacttggtaactccaaagttctgtcctacaaccccaagaagcaagcttcttggtttgggctcttccccgttcgctcgccgctacttagggaatcgatttttctttctcttcctgaaggtacttagatgtttcagttcccctcgtctaccttcattaagctatgtattcacttaatgataatactcgattaaaagtattgggttcccccattcggaaatctccggatcaaagcttacttacagctccccgaagcatatcggtgttagtaccgtccttcatcggctcctagtgccaaggcatccaccatgcgccctttataacttaacctatctttacctacggtaaagggttattatttgagtttagcgatatgaactaattcatatttctattattaaaaaactctttaaaacgcaatgtttttctcggcttttaaaactaatatattacttattatccagttttcaaagaacaaagtttgagagtagacctctcaaaactaaacaaagttttgatttcgcaaatgtacaaggttttccgtattattccttagaaaggaggtgatccagccgcaggttctcctacggctaccttgttacgacttcaccctaatcatctgtcccaccttagacggctggctccccgaagggttacctcaccggctttgggtgttacaaactctcatggtgtgacgggcggtgtgtacaaggcccgggaacgtattcaccgcggcatgctgatccgcgattactagcgattccggcttcatgtaggcgagttgcagcctacaatccgaactgagaatggttttaagagattagctaaacctcgcggtctcgcaactcgttgtaccatccattgtagcacgtgtgtagcccaggtcataaggggcatgatgatttgacgtcgtccccaccttcctccggtttgtcaccggcagtctcactagagtgcccaactaaatgctggcaactagtaataagggttgcgctcgttgcgggacttaacccaacatctcacgacacgagctgacgacaaccatgcaccacctgtcactttgtccccgaagggaaagctctatctctagagtggtcaaaggatgtcaagacctggtaaggttcttcgcgttgcttcgaattaaaccacatgctccaccgcttgtgcgggcccccgtcaattcctttgagtttcaaccttgcggtcgtactccccaggcggagtgcttaatgcgttagctgcggcactgaagggcggaaaccctccaacacctagcactcatcgtttacggcatggactaccagggtatctaatcctgtttgctacccatgctttcgagcctcagcgtcagttacagaccagacagccgccttcgccactggtgttcttccatatatctacgcatttcaccgctacacatggagttccactgtcctcttctgcactcaagtttcccagtttccgatgcacttcttcggttgagccgaaggctttcacatcagacttaagaaaccgcctgcgctcgctttacgcccaataaatccggacaacgcttgccacctacgtattaccgcggctgctggcacgtagttagccgtggctttctggttggataccgtcactacctgatcagttactatcagatacattcttctccaacaacagagttttacgatccgaaaaccttcttcactcacgcggcgttgctccatcagactttcgtccattgtggaagattccctactgctgcctcccgtaggagtctgggccgtgtctcagtcccagtgtggccgattaccctctcaggtcggctatgcatcacggtcttggtgagcctttacctcaccaactaactaatgcaccgcgggtccatcctaaagtgatagccgaaaccatctttcaaccctacaccatgcggtgttaggttttatgcggtattagcatctgtttccaaatgttatcccccactttagggcaggttacccacgtgttactcacccgtccgccactcactcaaatgtttatcaatcaggagcaagctccttcaatctaaacgagagtgcgttcgacttgcatgtattaggcacgccgccagcgttcgtcctgagccaggatcaaactctcgattaaaagtttgtagctcttgttttgttgcttaatttatttgctagcgaaattgacttcgcaaatatgttgtgccccgaagggcgaccctacacatttggtttatcaaaactttgttcagttttcaaagatctactgtgttgaaacagctttttaattatatcatataactaattatctgtcaaacacttttaaaaattatttatcacttagaagttatagctccgtaagcaacatataatatgttatcacgattagaattaaataacaagcgtttttcaaaaacattttaattatttatttccttactcattactgagtggctcgcttttgacaacttttatatcttaccaagataagccacaatggtcaagctttttcgacataaatattacatttatttaaaatagatccaccttacagtatcccagtatttaattattctaaaatagataacaaaaaaaggctgaaccctaaggttcaacctttttaatttgcgtggcaacgtcctatcctcgcaggtagtttcccaccaactactatcggcgctaagaagcttaactactgtgttcgacatgggaacaggtgtatccttcttgctatcgccaccacactattttgtgcttgcgcactgagaagaacttcgttctctcaaaactgcataataagtaatattttcatttcaaaagcctaacattgcacctttggttaagtcctcgaccgattagtactagtccgctccatacatcgctgtacttccactcctagcctatctacctgatcatctttcaggggtcttacttccataaaggaatgggaaatctcatctcgaggggggcttcacacttagatgctttcagcgtttatccctgccatacatagctacccagcgatgcgcctggcggcacaactggtacaccagaggtatgtccatcccggtcctctcgtactaaggacagctcctctcaaatttcctgcgcccgcgacggatagggaccgaactgtctcacgacgttctgaacccagctcgcgtaccgctttaatgggcgaacagcccaacccttgggaccgactacagccccaggatgcgatgagccgacatcgaggtgccaaacctccccgtcgatgtggactcttgggggagataagcctgttatccccagggtagcttttatccgttgagcgatggcccttccatacggaaccaccggatcactaagtccgactttcgtccctgctcgatttgtcaatctcacagtcaagctctcttatacctttacactctacgaatgatttccaaccattctgagagaacctttgagcgcctccgttacactttaggaggcgaccgccccagtcaaactgcccacctgacactgtctcccgccacgctaagtggcgcgggttagagtggtcatacagttagggtagtatcccaccaacgcctcaatcgaaactagcgttccgatttctacggctcctacctatcctgtacaaactgtacaaacactcaatatcaagctacagtaaagctccatggggtctttccgtcctgtcgcgggtaacccgcatcttcacgggtattataatttcaccgagtctctcgttgagacagtgcccaaatcattacgcctttcgtgcgggtcggaacttacccgacaaggaatttcgctaccttaggaccgttatagttacggccgccgtttactggggcttcaattctgggcttcgcttgcgctaactcatcctcttaaccttccagcaccgggcaggcgtcagcccctatacgtcatcttacgattttgcagagacctgtgtttttgataaacagttgtttgggcctattcactgcggctgacctgacggtcagcaccccttctcccgaagttacggggtcattttgccgagttccttaacgagagttcactcgctcaccttaggatattctcctcgaccacctgtgtcggtttacggtacgggtagtttatttctcactagaagcttttcttggcagtgtaacatcaggaacttcgctacttaatttcgctccccatcacaacttgtccttaaagaatcaagcatttcactcaactcaagacttgttgcttggacacacatttccagtcgtgtgcattccttagcttcctgcgtccctccatcattcaaacaaaataaactagtacaggaatatcaacctgttatccatcgactacgcctctcggcctcgccttaggtcccgactaaccctgggaggacgagccttccccaggaaaccttagtcatacggtggatcagattctcactgatctttcgctactcatgccggcattctcacttctaagcgctccactagtccttacgatctagcttcatcgcccttagaacgctctcctaccgcggacacttacgtgtccacccacagtttcggtattatgtttagccccggtacattttcggcgcagcggcactcgactagtgagctattacgcactctttaaatggtggctgcttctgagccaacatcctagttgtctgtgcaccgccacatccttttccacttaacataaattttgggaccttaactggtgatctgggctgtttccctttcgactacggatcttatcactcgcagtctgactcccggaactaaatcaatggtattcggagtttatctgaattcagtaacccatgacgggcccctagtccaaacagtgctctacctccatgatccaatattccgaggctagccctaaagctatttcggagagaaccagctatctccaagttcgattggaatttcaccgctacccacacctcatccccgccattttcaactgacgtgggttcggtcctccagtgtgttttaccacaccttcaacctggacatgggtaggtcacttggtttcgggtctacatctatatactcactcgcccatttcagactcgctttcgctacggctccagcttttcactttaacctcgcatataaacgtaactcgccggttcattctacaaaaggcacgccatcactcattaacgagctttgactaattgtaggcacatggtttcaggatctatttcactccccttccggggtgcttttcacctttccctcacggtactggttcactatcggtcactagggagtatttagccttgggagatggtcctcccggattccgacggaatttcacgtgttccgccgtactcaggatccagaacggaggtcaagttgtttaatctacgtggttatcacactctttgactcagcttcccagctgattcgattacaacttaacttggtaactccaaagttctgtcctacaaccccaagaagcaagcttcttggtttgggctcttccccgttcgctcgccgctacttagggaatcgatttttctttctcttcctgaaggtacttagatgtttcagttcccctcgtctaccttcattaagctatgtattcacttaatgataatactcgattaaaagtattgggttcccccattcggaaatctccggatcaaagcttacttacagctccccgaagcatatcggtgttagtaccgtccttcatcggctcctagtgccaaggcatccaccatgcgccctttataacttaacctatctttacctacggtaaagggttattatttgagtttagcgatatgaactaattcatatttctattattaaaaaactctttaaaacgcaatgtttttctcggcttttaaaactaatatattacttattatccagttttcaaagaacaaagtttgagagtagacctctcaaaactaaacaaagttttgatttcgcaaatgtacaaggttttccgtattattccttagaaaggaggtgatccagccgcaggttctcctacggctaccttgttacgacttcaccctaatcatctgtcccaccttagacggctggctccccgaagggttacctcaccggctttgggtgttacaaactctcatggtgtgacgggcggtgtgtacaaggcccgggaacgtattcaccgcggcatgctgatccgcgattactagcgattccggcttcatgtaggcgagttgcagcctacaatccgaactgagaatggttttaagagattagctaaacctcgcggtctcgcaactcgttgtaccatccattgtagcacgtgtgtagcccaggtcataaggggcatgatgatttgacgtcgtccccaccttcctccggtttgtcaccggcagtctcactagagtgcccaactaaatgctggcaactagtaataagggttgcgctcgttgcgggacttaacccaacatctcacgacacgagctgacgacaaccatgcaccacctgtcactttgtccccgaagggaaagctctatctctagagtggtcaaaggatgtcaagacctggtaaggttcttcgcgttgcttcgaattaaaccacatgctccaccgcttgtgcgggcccccgtcaattcctttgagtttcaaccttgcggtcgtactccccaggcggagtgcttaatgcgttagctgcggcactgaagggcggaaaccctccaacacctagcactcatcgtttacggcatggactaccagggtatctaatcctgtttgctacccatgctttcgagcctcagcgtcagttacagaccagacagccgccttcgccactggtgttcttccatatatctacgcatttcaccgctacacatggagttccactgtcctcttctgcactcaagtttcccagtttccgatgcacttcttcggttgagccgaaggctttcacatcagacttaagaaaccgcctgcgctcgctttacgcccaataaatccggacaacgcttgccacctacgtattaccgcggctgctggcacgtagttagccgtggctttctggttggataccgtcactacctgatcagttactatcagatacattcttctccaacaacagagttttacgatccgaaaaccttcttcactcacgcggcgttgctccatcagactttcgtccattgtggaagattccctactgctgcctcccgtaggagtctgggccgtgtctcagtcccagtgtggccgattaccctctcaggtcggctatgcatcacggtcttggtgagcctttacctcaccaactaactaatgcaccgcgggtccatcctaaagtgatagccgaaaccatctttcaaccctacaccatgcggtgttaggttttatgcggtattagcatctgtttccaaatgttatcccccactttagggcaggttacccacgtgttactcacccgtccgccactcactcaaatgtttatcaatcaggagcaagctccttcaatctaaacgagagtgcgttcgacttgcatgtattaggcacgccgccagcgttcgtcctgagccaggatcaaactctcgattaaaagtttgtagctcttgttttgttgcttaatttatttgctagcgaaattgacttcgcaaatatgttgtgccccaaagggcaaccctacacatttggtttatcaaaactttgttcagttttcaaagatctactgtgttgaaacagctttttaattatatcatataactaattgtctgtcaaacacttttaaaaattatttatcacttagaagttatagctccgtaagcaacatataatatgttatcacgattagaaataaataacaagtgtttttcaaaaacattttaattatttatttcctcactcattactgagctactcgcttgcgacaactttactagtataccaacttacaatagcagatacaaggactttctgaaaaagattcaaaaaaagaagacccgcgacacaaatccgtgtctgcgggtcttctcttgttattaagcgtatagtttagcaacttgtttttgtaattctggatgtgctaagaattcatcatagtttgtttcggcacgatcaactaaaccgttagctgaaacttcaatgatgtgatctgcaattgtttgaataaattggtgatcatgagatgtaaagatcaaagcacccttgaaatcgatcaaggcatcattcaatgatgtaattgattccaaatccaaatggttagttggatcatctaatagtaaggtatttgatttttgaagcatgatcttagataggatacaacgaaccttttccccaccagagagaacattaatttccttcgttacttcatccccagagaataacattttccctaagaaaccacgtaagaaggtattgtcgtcttcacccttagcggcaaattgacgtaaccagtctaagataatgagttgatcatcattaaaggctgagttcgtatctcttggtaagtatgattgttgactcgtcacaccccatgtcactgtaccactatctggttctacttcaccagctaagatttgcattaagacagctgtcgcaacgtcatttcgtgaaacgattgctgctttttcgtctggcttaactgagaagctgatgttatctaacactttaacaccatcgattgtttttgagacgttctcaacccgtaaaaggtcatttcccaattcgcgttcgaaatcgaacttaatgaatgggtattgacgtgaagaaggttggatgtcttctaatgtaatcttctctaattgcttcttacgagaagtagcttgttttgattttgaagcattagcactgaaacgtgcgataaagtcttgtaattctttgatttgttcttcttttttagcattaacgtttgattgtaacttagctgccaacttacttgattctaaccagaagtcgtaattaccaacaaatgtcttgatgcgaccaaagtccacatcacacatcattgtacatacttggtttaagaagtaacggtcatgggaaacaacaataacgatattcgggaagtcagccaagaagttttctaaccattcaactgaggcactgtccaaaccattagttggttcgtccaataataggatatcaggtttgccaaagagcgcttgaccaagtaaaaccttaatcttttgcccttccatcaattcactcatcttcacatggtgtaaagattcatcgatacctaaagcttggagtaattgagcagcttctgattcagcatcccaaccattcatttcagcgaattcagcttctagatcagcagccttcatcccatcttcttcagtgaattcagctttagcgtatagggcatccttagcttgcatcacttcatataacttcttatgaccttggatcacggtctctaacacttcaaattcttcaaaagcgtagtgatcttgattcaaactcgacatccgttcattagggcccattgagatgtggcctgatgatggttgtaatttaccttctaataattttagaaaagttgacttacctgcaccattggcaccgatcacgccataacaatttccaggtgtaaacttcaaattaacgtcttcatataacttacgcccagaaagcgttaagctcatttcactaacagttatcacttgattccctcacttttctttcatgactctaaaaagccaaccgtttcatgtgaaacggctggctttctaccattgacaatatatgcttaactctaacatatctaatgactagttatcaaccaggctatttgaccttagcaatcttaccctgttgaatatagacgcttagaatcccgatatcggctgggttcaccccaccaatccgacttgcttgtgcaagtgtttcgggttgaattttttgtaatttttgacgaccttctgttgcaagaccttcaattgcgtcgtaatcgatattggctggaatcttcttggcttccatccgttttaacttcgcaatcttagccttttccttatcaatatatcctgcgtatttgacttggatttcaacttgttccacaacacggttatcgattccttcaaccgctggaatgaattgaattaaatcagcatacttcacttctggtcgttttaagaagtcactggctaaaacaccatctttaagtggcgcttcacccttagcagctaaaaaggcttggatttctggcgttggttttaagcgaatcttttctaaacgtgctaattcagcttcaaccgctgcttttttcacttcataactgtcaaaacggtcatcattgattaaacctaattcatgacccttttccgttaaacgtaaatcagcattatcgtgacgaagcattaaacggtattccgcacgtgaggttaatagacggtaaggttccttagtacccttagtaaccaagtcatcgattaagaccccgatgtaagcttcacttcgatccaagatgaatgggtcgcggcccgtttgtttaagggcggcgttaatcccggccatcaaaccttgaccagcagcttcttcataacctgaagtgccgttcatttggccagctgtataaagattttcaaccactttagtttcaagggttggttttaattgccatggttcaacgacatcatattcaatcgcataaccagggcgcatcatttgggcattttctaacccttcgatagaatgaatcattttgtgttggatttcttctggcattgatgttgagaaatcaccaacgtagtattcttctgtttcgcggccttctggttccaagaaaatttggtggcgaggcttatccgcaaagcggacgattttatcttcaattgatgggcaataacgtgggccgacaccttcaatcacaccggtaaacattggggcgcggtcgagattatcgcgaatcacttgatgcgtcgtatcattcgtgtacgtcatccaacaagaaagttggtctttcaaataagcactatcaggtgtttcgaaactaaagtggttcggttccttatcccctggttgttcttccgtctttgaaaagtcgatcgttgtgccgtccactcgtggtggtgtccccgttttaaaacgcgtcaacacaaaaccgttatcttcaagactctctgaaagtttaatagaaggaattgaattattaggacctgatgaatacgttaattcaccaatgataatcttgcctcgtgaggctgttccggctgttaaaatcacactgtcagcactgtaacgagcacccgtgttagtcacaatccctttgcagacaccgtcttcaacgatcaatgattcagcaatgccttgacggagtgttaagtgctccgtcgtttcgattgtccgtttcattgtccggtgataggcatgcttatcagcttgggcgcgtaatgcgcggacagctgggcctttacctgtatttagcatccgcatttggatgtaagtcttatcgatattgcggcccatttgaccacccaaggcgtcaatttcacggaccacgatgccttttgccgggccacccaatgatgggttacatggcataaaagccaccatatctaagttaatcgttaataataatgtttcgcggcccattcgtgcagcagctaatgccgcttcggaacccgcatggccggcaccaacaacaatcacgtcgtagtgcgctacgtcatattctcgcatgttttgttctcctttaatatggttcaagacctatttacctaaacagaattggctaaagagttccgtaatcaattcatctggtgctgaatccccggtaatctcaccgagcttgtcccaacagttggtcatatcgatttggacgaggtcaactggcatgccagctgcaatcccgctaataacttcatctaatgattgttgtgcttggtttaataagccaatttgacgggcgttggtaatcatcaccgtactttggctattttcaatcccaccgaagaagagtttggcgatttgggcttccaaatcagtcaccccttcactcgttaaaattgacgtttgaatcacttcatccgcacgtactaatgtttggagttcatctaagtccaattgattaggtaagtcagtcttatttaaaataatgatccgttttttatcagttgtcgccgtgattagttcgcgatcttcaatcgttaaaggttcactttggtttaggaccagtaaaatcaagtcggctttggtaattgctgcgcgacttctttcgaccccaatcttttcaaccttatcttcggtatcatgaatccccgccgtatcgaccagtttcaatggtacaccgcggacgttgacgtattcttctaaaacatcacgcgtcgttccagcgacatccgtcacaatggccttatcttcatgtaaaagatggtttaacaaacttgatttaccaacgtttggtcgcccaacgatggccgttgccaacccttcacgcaagactttgccttgttgcgctgtttggagtaattcaccaatccgccctttaacaagttcagctttttcaagtaaaattcgggtcgtcatttcatcggtatcgtattcgggatagtcaatgttaacttcgacttgcgccaatacttctaagatttcttggcgtaaattcttaatgagatgcgttaagctcccatccaattgatcaacagcaacttgcattgcccggtcagttttagcccggataagatccatcacagattcagcttgggttaaatcaatccgcccgtttaaaaaggcccgcttcgtgaattcacctggttcggccattcgtgcaccgtaactcatcaatagttgcaagattcggttagtcgccacaatcccaccatgacaattaatttcaatcacatcttcgcgcgtaaatgttttaggcgctcgcatgacagaaaccatgacttcgtcgaccaccacatccgttttagggtcaataatatggccataattaatcgtatggcttgccactttatcgagatccttgccgcgataaacccgtttaatgatggctaaactgtcatctcctgaaagacgcacaattgaaattgccccctcaccaggtggtgttgagatcgccgtaatcgtatcaaattctgtgactgtcgttggcattataaaagcttccttcctaaaatagctgcataaaaaaagcgcttagcgtccacccctcccgtcattgcgtaaggggtggacaaagcactttcactactttatcgatatttaattagtttcattatacacgatttctatcgaccgtcaattgacaagtcttaaaaagaacgggctgattcaaccacaattacccggcgatcaccgcgcccttctgagtgagtttggacgtgacggttgttcgttaaatagccatgaacaatcttccgttcaaacgctggcattggctctaaagtgaccgccttaccagttgcgaccacttctctggccgccttatccgctaaatgtttaacaattgtcgctcttctttgccgataatcgccaacatccagcatcatcaattgttttcccttggtgtgatgatcgtaatacgtttgcgctaaatattggagcgcattgatcgtcttcccgtgtttgccaatcagcaaaccttccttagtcgtctttaaatggaagatgacttgcttgtgttcttttgtaacggtcatcgtaaccggcgtgccaatctgtgctgttatgtcggtaatgtattgctttaaagcttcgatcgtcgcctcacgactctgacgcattggggccttttctggctgatctgctggttcagttgccacgtcttcaacgcttggttgttccggttcaactggggttggctcagcgaccgttatcggatttaacgtaacgattgctggttgcttaccaaaacctaaaaaacctttcttaccttcttcaaggacatcaactgtgaccttatcacgcgttaattttaacgctgctaaccccgcatcaattgcggcttgaatatccttaccttcaaaagttggcatttttaaacctccgctcattaagcgtcagtttgtcactggacgcttatttttatctaatatcagtataacatgcccgctttttaagcgacacttaatctaaatcggtagcggttagttctaaaaagagcgccacatcttgggcaatcgagtccgccgctgcttgccaaaatgccggttgcatcaaatcaacgcctaagtgtttttgcgccaattcttcagtactcatattggctgtgtcttgcaagagtgcgatataatccgcttcaaagtgcggcacactttgcgccttggcgtaaattcccattgaaaagagatatccaaatgtatacgggaagttataaaatggcacatcatcaaagaagaaatgttgtttgtccgcccagaataatgggtcataatccgttagcgcatccgcataggcttccttttgggcgctcaacatgatgcctttcaaatcgtcaggcgttagtagtccttgttgccgcatttcatagaaacgatgttcaaataaatagcgcgcatgaatattcataaacatatcgatggcgttcgttattttttgatcgagtaagttaatcttcgttgcgcgatcttgtgcttcattgaccgttgcgtcgaccacgattaattccgccaacgtcgaagctgtttcggcgacgttcatcgcgtaatcttggcgccagccaggtaattgattaatcatcatcgtatgaaagccgtgccctaattcatgcgccaaagtcgagacgccgccgggtgtgccatcataggtcatgaaaattctaaaatcattcgtctcgggtaaatcggtcatgtagccacccggttgtttacccggtcgatcttccgcttcaatccactgcttttcaaatgccgtttgtgcgacggctgccattttcggactgaaatcccggaaatgcgcaatgataaattcagcagcttcgtcatacgattttttagtcatctggaaatcatcaacaacgaccggtgcccaagtatcttgccaagctaactgctttttacccattaaagcggccttccggttcaaaaaagcaaccagtggtgctttattttggctgactaccgaccacatcgcatccagtgtggctggttgcatccggttatattccagcggttttttcataaagtcggtggtcccatgagcttggtaagtcgttaatctaaaaccagctaggtgattcaaggtatccgccaacattggtgagaaacgatcccaagtttgttgccaatttttaaaaaccacttcgcgaactttagaatctggatctgattcaaacttattttgagcctgcccagctgataaggtttgatctaaataaggaatctgggtttccgcaacgatcgtatcgtagtgatcactccatccttgcaaaccatcgagtgccaattgatccaataatttttcggtttgttcatctaataagtccgccccttgctggcgtttttcccgtaggttgaactgaatcggcgcaaaggctggttggctgactaatgtttcgaattgttcaacagtcaaggccaccaattttttcgtcaataagacatcaatttgacgggcggtattttgcaattgattaatccggtccatcatggatgccacttgttggttgcgttcgtcaaccgattgaatcatgttgacaaaactgcccgtttgcttcaacccggattcaatttgttgtaattgcatcgtgatggcctgcatttgttcaaaggctggttcatcaaacacaaattgccagtcacttgtcatttttaaaacaaccggaatctgttgccccaatgcttggagtcgattttctaaggctggtgaggctaagccccctttaaaaatggtttctaaatcccattgttctgagtaagtcatatccttgccctccgcttttcaactattgcgcctattataacgaattttaacgaccagtgcgacgattttaaacggccgcctactagacatttaatttaaatctgttatattagcgatgtaagcagatacataactgctaggaaggcgatgctgaacatgaccattgaacaaataccagccaacacattggcagatttagccgcattattaaataggcgtgaagtccctgacgaaatcatggcgaccggaccagaattgatccagtacggtcaacatctcaaggctagccaactatcagatgaagcccacctcggcagcgatctaggtggtgccggtcttttaacccttatcgaacaagctaacacggcgtttttcgatcactttcatctctttggtgatgcagccccgatcgacaccaaattaacgcgcaaagtggtcacgctctatcatctaaaaccaattgatgaccagcacttcttattccgcttgaagcagttggattattaaaacacaaaaaagaccgaccagcataaaatgctggtcggtcttttaattttaaaattaacgttttttcgttgctttcttacgtgctttagcaagtgctttttcccgatcacgtttaacttgttctttagcttcacgttcccgacggatcttgaatggattttgaatcaccattgtttgaccaacagaaaaggcatttgtaactacccagtaaattgaaacggctgacgcaatgttcatcgccatcacgaaaatcatgattggcattacccagagcattgcggtcgttgtggcattcttcgttggttgtgacatcatcgttaaatatgatgtggcaaacgtaaagacggccgccaaaatcgccataataaagtacggatcagctttaccaagttgcatccataagaatgacccactcttcaaagcagatgtccggtagatggcttgatacaaggcaatcaagactggcatttggaccaataatggtaaacaaccaatcacaggattgacccctgcttcagcgtaaagtttctgtgtttcttcacgtaatttttgttgtgtttcaacatctttagaagcgtatttcttttgaagggcttgaatttcaggtgccacttcttgttgcttcatcattgtcttactttgccaccaagttaatggcaaaataatcaaccggataataatagtaaaggcaacgatggcccaaccataactaccaccaaagatatcagctaaccacaacaggaatcgtgagaagttataaataatatagtgatcccagaaaccagtgctagcactgctaacaggtgcagtactacacccagcagcaattagcataaataagaataaactagcgactaataatagtcgtttgcgattttttgaattcactctcaatccctcacttattcagaagcagaatctgcttcttcctttaataacttagctagcttgaagacatggattaaattttgttttgtttctgccatcgttaattggttagcgccacgtcttgcgatcaccaaaaagtcaacgggttgcaacaaatctggtttcaactccgtaatactttggcgaatataacgtttcacctgattacgcatgactgcgttacccacttttttaccgacagaaagaccgactctaaaatgtttttgaccaggcttatctaagcggtaaaccacgaaattgcggttggccactgattggcttgcatcaaaaaccgtttggaaatcttgttcttttttaacacggtacgactttctcataattcactccggcatttctattaataaattgaggataataaaaaaaccactgaagcatcagtggcctatgcagataatacttttctgcccttagcacggcgtcttgcaagtaccttgcgaccgttcttagtattcatacgtttcatgaaaccatgaacacgttctttatggcgtttctttggttgaaatgttctctttgtagtcattaatctggcacctcctaattgactatgtctattgttttcttatctgagaaacaactggcggcaataaccacctatgacattcactaaaatataatagcatatttctatagaagttaaaacactttctgtaaaaaaattcgttaaatttggttgtccacagatctgaaaaattttgtttttcttgtggataacctgactagtcgattttaacataatttttatccccagcaaacctaccagagttatccagagaatcacagggtgtttatcagttatccacacctgtttttaacgttgtgaataagtctgaagaacccgcactatgaaagcgtctattttcaattcaattttgtggataactctaaaactgctgtgtgtttcacagttgtccacaccccggaataaaagttatccgcctcgttgtggatgagtgcataactttttatttttatcctgtggattttgttcttgttgtggaaaacttttttttagaatgctagaatgtatttagtctttctttattgagtatttttcaataaagtggtgattttatgtgaggaggacacgctacatgcctgatcttcaggaactttggaattatctgcaagaaaaattccaaaccgatctaaccacggttggctttaacgcttggattaaaaccgctaagccgcttgcttttagagctaacgaactactaattgaagtgccttctgtcttgcacaaagaatactgggaaaataacttggcgactaaagtcgttgaaggggcctatgagtttgcggaaatcgagctgacccctatttttgtgttacctggtgaatctgacaacttaacaccgcttgaaccagaagaagaacacgttttaacgaaggctgaaacaccaacctttttacgtgaaacgcatttaaatagtaaatatacatttgatacgtttgtcactgggaaaggcaatcaaatggcccacgctgcggcattagtggtttccgaagaacccggtgtcttatacaatcccctcttcttatatggtggtgttggtttaggtaaaacccatttgatgcaagcgattggtcaccaattactcgaatcaaaacccgaaacgaacgttaagtacgtgacgagtgaggcttttgccaacgattttatcaattcgattcaaacgaagaatcaagagaaatttagacaagaataccgaaacgtcgaccttttattagtggatgatattcaatttttcgctgataaagaagggacgcaagaagaattcttccatacgtttaatgatctctataatgataagaaacaaattgtgttgacctctgatcgcctcccaaatgagattcccaagctacaagaacgcttggtttctcggtttaaatgggggttaccagtcgatatcacgccacctgatcttgagacgcgaattgcgattttaagaaataaagccgatgcggaacatctggaaattccagaagatacgctcagttatattgctggtcaaatcgattccaacgtccgagaattagaaggcgcactcgtgcgggtccaggcctatgcaacgatgcaaaacgctgagattacaaccagtctagcggccgacgcgctcaaaggcttgaaactcaacggtaaatctagtcagctctcgattgccaagattcaatcggtggttgctaaatattacagcttaaccgttgccgatcttaaaggccgtaagcgggtcaaagagattgtattaccgcgccaaatcgcaatgtaccttgctcgcgaaatgacagaaagctcattacctaaaattggccaagagtttggtggtaaagatcatacgaccgtcatgcatgctcatgaacggattagtcaaagtttgacaaccgatcaaaatctaaaagatgccattttggatttgaagaacaccatgaagtcttaaaaatgggttgtggataaagttagaagttatcctgaggattccccacattttatccacaggtggaaaactatgagattcttggctttcaatacttacccacaggttccacaggccctactactattactttaaaatcttttaatatatatataatattcaccctcggaggtagcacctatgaaattttcaattaaccgcgccctatttatcaaaacgctcaatgatgtgcaacgggccatttcagctaaaacaacgattccgatcctaacagggcttaaacttgttctatcgcaagaaggcttgacgctaaccggtagtgatgcggatatttcaattgaagcaaccttgtcagcctcagatgaaaaaaaccaattagtcgtcgaagaagttggcaaaattgtgttaccagcacgtttctttagtgaaatcgttaaaaaattaccagaagatcagatgcgaattgcagttggaaataatttccaaacaacaattcgctccggtaaatcagaatttacaatcaacgggttagacgctaatagttatccacaccttcctgaaattgcagggcaaaatacatttagcatcagtaccgatgttttgaaacaactcattcaccaaactgtcatcgccgtttctaatcaagaaagtcgcccaatcttaactggggtccacttggtcctagccaatggcgaaatgttagccgttgcgactgatagccatcggttagcacaacgtaaattaacagttgcgcttccaagtgatgccaattatgacgtcatcattcctggtaagagtttggtagaactttcaagaacgcttgcggatgatgccgaagacgttgaaattcggattgctgaaaaccaagtcctctttaaagctggcaacttagccttttattcacgcttattagaaggtaactatcctgatacagcacgtttaattccaacttcatcaagtacccaaatcgaatttaacgcgccagtcttattggccgctatcgaacgggcgtcattgttatcccacgaaagtcggaacaacgttgtccgtttgacgctcgatacagaggctaatacagcgattatctatggtaattcaccagatgtggggaatgttgaagaagcccttcaatttgaaaacctcacgggtgaatcccttgaaatttcatttaaccctgactacatgaaggatgccttgcgttcatttggccaaacaacaatcgtgattaactttacggctgctttacgaccatttacgttggttccaagtgaagatcaagaacactatattcaattgatcacaccagtccggacattctaaaattaaataacaactcaaaaacgcctcgatgagaggcgtttttttgtgaactagaattaaaataaattcggttacagcgatttaagatatttctagtaggagaggggtaattttgtcaaaaacgctgagaaagcattttaaccatgtttatttgtttttagtgctaaaaaagtctataattactaggtataacggattgttatttttccagtaattaatatcgttaagaatggtgggttaatatgacacaagaaattaaacttgaggctgaattcgtcacattaggacaactcctaaaagaagccggcattattgaaacgggtggcaaagccaaatggttcctaagagaaaatacggttttagtcaacggcgaacctgatgatcgacgtggccggaagttatatccagaggatgtcattgaagtcccagataacggccaattcatcgttaaacaacaagaaagattgtaggcagctatgtatctaagcgaactacaactgaatcattatcgtaattatgagtcagttgatgtgcacttttcaccggatacgaacgtcttgattggtgaaaatgcgcaggggaaaacgaacctactagaagcaatctacgttttagccttggcccgctcacatcgtacgaataccgatcgcgaattaattcaatggcatgaagacttcgctaaaattaccggtttggtccaacgttctgcagggaaaaccccgttagagctcgttttaagccaaaaaggtaaaaaggcgaaggtcaatcatttagaacaggctaagttatcacaatatattggtcggctaaacgtcgtgttatttgcgccggaggatttaaacatcgttaagggttcgccagctgtgagacgccatttcatcgatatggaattcgggcagatgagtagcaagtatctctataatatttcgcaatacaaatcaattctgaaacagcgtaatcaatatcttaagcaactccaacggcgccaagccaaggatcttgtttatttaggtgttttatccgatcaattagcggcttacggggcggaagtgaccgtagcccggcgccagtttctccaacaaatggaaaaatgggcccaaaaattgcatcaggagattacgaaggatcgggaagtcttgacgtttaaatatcaaagtcaaattccagaagaacaattagatcaaagtgtcgaagaactctatcaacaatttcaaaccttgtatgagaaacaacaaacccgtgaggttgaacaaggcacgacgttgattggtccccaccgcgatgatgttcaatttttagtcaacgataaggatgtgcaggcctttggttcccaagggcaacaacggacaaccgcgttgagtgtcaaattggccgaaattgacttgatgaaggcccaaaccggggaatacccgattttattactggacgatgtgttgtcggaattagacgatttacgccaaacacatttgttgaagacgttccaaaacaaagtccaaacattcctcacaacaaccagtttagagaatgttaaaaaagaaattattgcgacgccgcgcgtgtttacagtcaccaacggggtcgtcacagaagaacaagtagaatagttggcataataagacgatcaaatggaggtatttttcttggcagatgatcaattgaacaaagaaacagaagcccaaattgaggcaaaagaagaacgggccaaatcttatgatgcgagccaaattcaagtcttagaaggactcgaagcggttcgtaaacgaccagggatgtacattgggacaacgagttctcaagggttacatcatttggtttgggaaattattgataacgggattgatgaagcgctcgctgggtttgcgactgaaattaacgttgtcgttgaacctgataatagtattacggtgaccgatgatggccgggggattccagttgggattcaagctaaaacgggtaaatcagcgctagaaaccgtctttacgattttgcatgccggtggtaaatttggcggcggcgggtacaaagtttctggtgggctgcatggtgttggggcctcagtcgttaatgccttgtcaaccggattagatgccgttgttacacaaggcggcaagcgttattacatcgatttcaaacgtgggaaagttcaaacaccaatgaaaatgatcggcgacgcacccgaacatgaacatgggactaaagtccatttcgtgccagatcctgatattttcacggaaacgacaatctatgacgataaaattttaacgactcggattcgcgaattagcattcttgaataagggcttaaaattgacgtttaccgacaaacgggctgatacccatgaaaaacttgaattccactatgaaggtgggattaagagttacgttgaattcttagacgaaaagaaggaaacactccttgatgaaccaatctatgttgaaggtgaacaaaacgggattaccgttgaagtggcgcttcaatatacgaatgattatcggaccaatttgttaacatttgccaacaatatccatacctacgaaggtgggacgcatgaatccggctttaagacggctttaacgcgggtcattaacgactacgcaacaaagcaaaatatcttcaaagcaagtgatgcaaacctttcaggggaagatgttcgtgaagggttaacggctgttgtctcagttaaacatccagatcctcaattcgaaggtcaaactaagacgaagttaggcaatgcggatgcgcgttcagtcactgatcggatgttctcagatcactttacgaagttcttgatggaaaacccatcgattgctcgtcaaatcgttgataaaggctcattggcggctagagcacgcttagccgctaaacgcgcgcgtgaagttacccggaagaaaaatggtcttgaaatctctaatttacctggtaagttagctgataacagtagtaaagatcctgaaatctcagaattattcatcgtcgaaggggattctgccggcggttcagcgaaatcaggtcgttcacgtttaacgcaagccatcttgccaattcgtgggaaaatcttgaacgttgaaaaagctagcatggaaaaaatcttagcgaatgaagaaattcggacgctctttacggccatgggaacaggctttggacaagaattcgatgtcgaaaaggcccgttatcataaattgattatcatgaccgatgccgatgtcgatggcgcccatatccggacgttattattgacgttattctatcgttacatgcgcccaatcgttgaagctggctacgtctatatcgcgcaaccacctttgtaccgggttaaacaaggtaagatgatgcgctatatcgattctgatgaagaattgcaagatgtcttaggcaccctacaaccaagtcctaaaccagaagtacaacgttacaaagggttaggtgaaatggatgccagccaattatgggaaacaacgatggatcctgaaaacagacggatgctccgcgttaacgtggaagatgctgaagaagcggaccaaattttcgaaatgttaatgggtgatcgtgttgaaccaagacgcctattcatcgaagaaaatgccgtatacatggatccaaagagtattgatgcgtagtaatctactgatcaatgaagactgactgagaggggtttaatagattaatggcaaacgaaaatggccaagatggtcggattgaaaacgtcaatttatctaaaacaatgcgtaaatcattccttgaatacgcaatgagtgtcattgttgcccgtgctttaccagacgttcgtgatggtttaaagcccgtacaacgccgtattttatacgggatgagtgaattaggggttacccctgaaaaaccttataagaagtccgccagaatcgttggggacgttatggggaagtaccatccacatggtgattcagcgatttatgaagcaatggtgcggatggcgcaagaatttagttatcgttacatgttagttgatggtcatgggaactttgggtctgtcgatggtgatggcgcggctgcgatgcgttataccgaagcccggatgagtaaaatggctgttgaaatgttacgcgatatcaacaaaaatacaatcgattatgtacctaactacgatgaatcagaacgcgaacccgctgttttaccagcgcgcttcccgaacctgttagtcaatggggccactgggattgcggtcgggatgacgactaatattccacctcataatttggctgaagtgatcagtgccatccatattttgatggataatcctgatgcaacaaccgccgatttgatggatgctttaccaggacctgacttcccaactggtgggttagtaatgggtaaatctggcattcgtcatgcgtatgaatccggcaaagggacgattacgttgcgggccaaagtcgatgttgaagttaagaaaaacggtcgtgaacggattatcgtgactgaaattccttacatggtcaacaaagcaaaattggtcgaaagaattgccgaattagcacgggacaagcgtcttgaaggaatcaccgatttaaacgatgaatctgatcgcgacgggatgcggattgtgattgatgttcgccgtgatatgagtgcttcagtggttttaaataatctctacaaactcacaccattacaaacctcattctcattcaacatggtggccattgttaacggtgccccaaaagtcttaagcttaaaatcaattcttgaacactacttagtgcatcaagaagaagtgattcgtcgtcggactgaatttgatttgaagaaagccgaagcaagagcccatatcttggccggtttgcgaattgcattggatcatatcgatgctattattcaaatcatccggagttcaaagactggcgataccgctaaagtcttgttgatggaacgttatgacttatctgacaaacaagcccaagctattttggatatgcgactcgttcgtttaaccggtttggaacgtgacaaagttgaaaatgaatacaataatttgatggcgttgatcactgatttgaaagatatcttagccaaaccagaacggattaagaaaatcatttatgatgaattgttagaaattcaaagtaaatttggcgacaaacgtcggactgaattattggtcggcgaagtcctcagtatcgaagatgaagacctaatcgaagaagaagatgtagtgattgccttgacgcataacggctacatcaaacgcttgccagcgagtgaatttaaagttcaaaatcgtggcggccgtggaattcaagggatgggtgttcacgatgatgatttcatcgaacacttaatctcaacttcaacgcatgaagtgctcctcttctttacgaatactgggaaagtttaccgtgctaaagggtatgaaattccagaatacggtcgaacagccaaggggattccaattattaatctcttagggattaattcggatgaacgcgttcaaaccgtggtcaatatcggtaaggaagtcaagcctgaacaagccttgttcttcattacccgcttagggacggttaaacggacggccgttggcgaatttgccaatatccggagcaatggcctgaaagccttgaccttgcatgaagatgatgagttgagcaacgtcttaatgactgatggtcaacaaaacatctttatcggaacgcataatggctacgccgtttccttcagtgaaacagccgttcgttcaatgggtcggacagcagccggcgttcgtgggattcgtctacgcgaaggcgactacgttgttggttctgacttgttgattccgggccaagaaatcttagtgatttctgaaaaaggttacgggaaacgaacagccgttagcgattatccaatcaagggtcgtggtggtaaagggattaagactgccaatatcactgaaaagaatggcccattagccgggattgcagcagtaactggtgaagaagacattctcttgattactgataccggcgtcttgattcgtttcaaggtggctaacgtgtcacaaaccggtcgggcaacacttggtgtgcgcttgattcgtgtggatgacgaagcgaaggtggcaacaatggccaaagtcgaagctgaaccagatgaacctgaaacacaaactgcaacgactgaaccaacagtgccaactgaaaacgtgacggacactggcttagcacaagttgatgatttattagcccgtgctgaagagaatcaaaacgaaccaaataacgactaatttaaaaaaataaaaatcgtttttgcgtaattacacttgtaaggattaacaagcgtgttagcaaaaacgattttttttaagtttgtatttacgtgctatttatgatagacttttatcttgtgagtatctgtgatttaggcacagggtctaaatcgtgaggctaatagtaatattagtcagttactccttgttcttacacaggtaagaacctaaagtccataaggaggtgaacagtcatggctcaatcaaaatacgaagttacttatatcatctcaacaacacttgatgaagaaagtaaaacagcccttgtcaaccgtttcgacggcatcttaaaagacaacggtgctgaagtggttgattcaaaagactggtcaaaacgtcgtttagcttatgaaatcaacaatcaacacgaaggcatttaccatatcgtaaatgttttagctgataatgatgaagctttaaacgaatttgatcgtctagctaagattgatggcgcaattttacgtcatatgatcgttaaacgcgaagactaattttgaattgtaatattgaatagaggggagctgacagaatgattaatcgagttgtactcgttggtcggctaacacgcgatgttgacttacgttacacttctagtggtgctgcagttgggactttctcaatggcagttaaccgtcaattcacgaacgctaacggcgatcgtgaagcagactttattaattgtgtcatttggcgtaaatcagcggaaaatttcgctaactttactaaaaagggctcattagtaggggttgatggccgtctacaaactagaaattatgaaaatcaacaaggtcaacgtgtctacgtgactgaagtggttgtcgataatttctcattgttagaatcacggacaacaacagagcaacggcaaggtgatggcgcaagtcagaactttaatagtaatcaaagcaatggtagccaacaatctggatttaccagccctcaacaaacgggtaacgcaccagccgcaaataacactcaagccgatccatttgcaaataatggtcaagcgattgatatttcggatgatgacttacctttctaaaataaactgttttggaaggaggaactttcaatggctcaacaaagaagaggcggcaaccgtcgtcgtcgtaaggttgatttcatcgctgctaaccacatcgaatatatcgactacaaagacactgatttattgaaacgttttatctcagaacgtggtaagattttacctcgtcgggtatctggtacaagtgctaagaaccaacgtcgtttgacaattgcaatcaaacgcgcacggatcatgggcttattaccattcgttacagaagactaaaaattaattttagagtcatcaaccaagtttacttggttggtgacttttttagtttccaagaggcgaacatgggattaaattgcgggctgagagcggtttttaattggtatttgtgctagaataaagtatgattctttaagatttagtaaagaaccaagttgttcaaatcaagatgtgctgcctaaaatacttgtttctttagagttaaggagtttacatgaaaaataaaattaagcaattaaaattaccgcagtttttagatgatgcgcgcttgcggatggtggccctagtcttattagggttgaccgccgtcagcctgatctttgcagcgatgttaaattggctcatcgctttgattttgttcgtgctcttaattgggaccttaatcaccgtcttgtacgcgattgagacggtcacggaaaatactgccaagtatgtttcggatttgtcctaccggattaaacgaggcgaacaagaggccttaatcaagatgccaatcggaattttgctctacaatgaaaaaggcgaaattcaatggaccaatccttatttacaacaatacttggggaataaggaagtccttggaaaaacgattaaagaagtcgatccggaattggccgaattagtcgtccaaaatgaagattccaacgaaactaagctcgttcactggggcgataatcaattccagattatcattcaagaaagtatcggggtggtttaccttctcgatatcacgcgttatgcggcgattgaagatcgttatgaagacgaacaggttgcaatcggccaagtctttttagataattatgacgaaatcacccaaacaatggatgatcaagctatttctaatctgaataactacgtcactaacgagctctctcggtgggctaatcagttccaaatgttcttaaaacgggttgatgatgatcatttcttcgtcctcgcctacgccaagtcgctccacgcggctgaaaaagagaagtttaagattctcgatgagattcgtgaagaaacttcaaaacaaaacttcccgttaaccttgagtgttggctttgcctatggggaatctgatttagccgttttagcgacgacttctcagagtaatttagatttagcccttggccgtggtggtgatcaggtggtcgttaaggccaacgatgggcaagcccggttctacggtggtaaaacgaacccgatggaaaaacggactcgagtgcgtgcgcgcatgatttcgcaagccttacaggaagttttcaagcaggtcgattcaatctttgtcatggggcatattcggcctgatatggatgcgctcggtgcgtcctttgggattcgacggattgctgaaatgaacggcaagaaatgttatgtcgtggttgatcaaaataatattcataccgatattcaacgcttgttggaagaggttaaggtttatccggaaattgcagtcgaagtcctttcacctgaagaagcggtggaaaaggcaacggctaacagtttattagtaatggttgatcattctaaaccatcgattacgatggcgcctaaattgtatgagaaattggcgcaacggacaattgtgcttgatcaccatcgtcgcggggaagagttcccagaaaacccaatgttggtttatatcgaaccctacgcctcttcaacgtgtgagttagtgactgaaatgtttgaataccaaccacaaaacgtggccaacattaacaagttcgaagcaactacgatgttagccgggattacggttgatacgcagtcgttttcaatgcggaccgggacgcggacgtttgatgccgctagttacttgcggtctgtcggggcggacgcatcaatggtccaacatctgttaaaagaaaacgtcgataattatattcaaaagaatcatttgattgaaaccattgaaatggttgaggacaatatggcattatgtatgggggaagacaatcgcagttatgatcccgtcattgcagctcaagcagctgatacgctcttgtcgttatccggcattgaagcggccttcgttattgtgaaacgcccagacggcatgattgccatctcggcacgcagtttaggggacgtcaatgttcaagtgattatggaaaaactgggtggcggtggtcacttatccaacgcggcaacccaattgaaggatgcgacggtttcagaagccaaagctaagttattagccgttctggccgaattatttgatccagaagaagcggaagaaaacgcaactaacgattaattaaaaaggtggtaaacgtaatgaaagttatttttttagaagacgtacgcggtaaaggtaaaaagggccaagtgaaagacgtgccagatggttacgcacaaaacttcttaattaaaaacggtaaggctaaaccagccacaacagccgctgtcagtgctttaaaaggccaacaacacgctgaagctaagaatgccgctgccgaattagcagaagctaaggttttaaagacgaagattgaagacgataaaacaattgttgaagtgaagtctaaagctggcgaagacagccgtttattcggttcaattccaagcaaacaaatcgcacaagccttagaacaacaatacaaaatcaaagttgataaacgtaaaattgatttaccagaaccaatcaaagcgcttggttatcgcaatgttgacgtccggattcacccagatgtaacagcgacaatccgggtgcacatcgtcgcagaataaattttttaattatccaaaagaccgtgattgcaatcaaagtcacggtcttttattatggtgacaggttgtatctggagagaaatttaagtaaactagatgcaataacgcaaacaagccaaaaggagataaaatggtgaataatgaactaatcgaacatacgccaccgcagaataatgaagcggaacaggcggttttaggcgctgttttcattaatagcgacgcattagttgaagcgatggaatacgtgactgccgatgatttctatcgtaaggcgcaccgcctaatcttcgaaacgatggttgaactaaatgaacggggcgaaggcattgatgcggtgacgatcaagagtgaacttgatgcccgcaatcaattggaagatatcggtgggattggctatttggctgaattagccgatgcagtgccaaccgcagccaacgtggtttattacgcgaagattgtctctgaaaaagcgatgcttagacgcttaattcaaacggcacaaaatattgtcgccaagggttacgcgcaagatgaagacgtgacggatattttggatacggctgaacaagagattatggcggtttctgaacagcaaaataaagccggcttcaaatcaatttcagacgttttaaccacgtcgattgaacatatcgataagctctatcaagaagaagaaagtattaccggtctttcaacgggctatccagacctcgataagatcacggctgggttgcatgaagatgaattgattatcttagcggctcgtcctggggttgggaagaccgcctttgtcttgaatatcgcacaaaatatcggcaaaatgaccaacgaaaacgtcgctatttttagtttggaaatgggtgccgaacaactggttaaccggatgttgtgtgcagaaggcagtattgatgccaaccatttaagaaccggtcaattagaagaatcagaatggcaaaatctgattattgcgatgggcagtttgtcgaaagccaatatttatatcgatgatacacccggcgtgaaaatggctgaaattcgggctaaatgtcggcgtttagcgaaggaaaaagatggtattggcctaatcgtggtcgattacttgcaactgattgaaggttccggtcaagaaaaccggcaacaagaagtttcagcaatctcacggcaattgaaaaagttagcgaaggaattacgggttcccgtaattgccttatcacaactttctcgtggcgtggaacaacgtcaggataaacgaccagtattatctgatattcgtgaatcaggatcaatcgaacaagatgccgatatcgtggctttcttgtatcgtgatgattattatcgtgatgaaccaggtgaagacggcgaagatggtggtagtcaaccagcaccagatccggaaaatgcggatgtcggtgaagtcgaagtgattattgaaaaaaaccgggccggcgcgcggggcacggtaaagctgttattcgttaaaacctataataagttctcgtcgatatcgtattcgcaaggtgaatactaatttaagagtgcgtttgaaacggtttgactttgagcattagcacagctcggtgaataactgctgcaggcagttgtttgacaagtgacgctaagcgcaaaagtcagtttcaaaaagcacgtttaaataaagagtgcgtttcaggtgtttatattgtgaaggcttaacctagtaccgtgaataagcgacgcagtcgattgtttgcgggacgtagttaaccgcaacaatatgcctgaaaaagcacgtttagatcaagagtgcgtcgtaaccctcaggatacgggttacagaacacgtttaaacgaaaaaagcgtcagtgaagtgaaccctaaatattggacgaaactttaagcagctttctgggttgtaaaaattcggtattcaaccggacttttacaacccagttttgttttaattcttgaaaaattataatcatcaatccaaaccgatatttgtgaaactagcgtttcataagtatcggtttctttttggtagaaagcttcggctttcataatatggaaaaagctctccattgatgcattatctaaacatgttgcttttcgagacatactttgaaaaatgcgatgttctttcaagatattagtccaatcttgatgctggtattgaaacccttgatctgagtggactgttgtccggtattttaaattcttagggattttcttaactgctcgatttaaaacagttgttgtaaattcaacagtagggtgtctgctaacttgatggctaagaatttcacctgagaataaatcataaatacatgtgaaataggcacgttcgtcaattgtcttggttccccagcgaacttcagtaacatctgtcactagtttttgatagggacgatcagtgaagaaacgacggtggattaagttcttagcaacggtcccaacattacctctatatgaattatacttacgagtacgtttgttaaatgcagttgatagtaattgtagttctcgcattaagacaagcacttttttatgatttactaagatattcatacgatgtaattcaccagttacacgacgataaccgtacgctggatgattcttcttgattgtttggatggcttgtttaacagattggtcagatgaaccgttcggttcatggctaataatgtattcatacgtacttttagccataccaactacttttagaatttttattaatttatgtttaagccttagctcttggatgacttgcgcttgttgtcttcttcttcctgaactaaggctcttaatttttttaggtattcattctcgatttgtagtaattcattttcttctctcagacgttctagttctgtttgctgccgttttttcgattgtttatcagctgtcataattgtttgccgtcctttggaacgatataaggcatcagcaccctcagtctcccaaatatgttgccattgccagatggtcccgacgtttgagatattaaaatgaagtgcggttttcggataagaagccttattcgttttcatccattttaaaacattcatcttaaatgagccatcaaatattttatcaggtgataggacatcgagcccctttagaccaaaggtctcataacgtcgaatccaaaaaagaacagatgaagaacttttaataccgtatttcctagcaattaatctgtatcctatggaggaagtcagataatcctgaacaactttcatttttaactctttagaatatttggtcaatataaaaacccccggtattggattttggtccaatatcgggggttcacttcacagacaaaaattaatttgtctgacgctttttatatgcttattgttgatgttttgcttcaattaacgagcggtagttaacaaggaggtttaagatcaccgctgttaaactgccgacaactaagccgttaccaagaatggtttggacactagctggtaaagcttgtagtaaggttgggtgaatggcaatcccaaggcccataccgattgaaagggttgcgactaagaggttacggttgtcttcaagatcaaccttgtggagcattttaatcccttgaatcccaacaatcccaaacatgacgaccattgcgccccctaaaactgaggttggaataatcgtggcaaccgcaccaatcttaggtaagagacccaagaagatgaggaagaaagctgaatagtaaacaggtttctttgttttgatgcctgataattgcacaatcccaacgttttgagagaaggttgaataagggaaggtattgaacaggccacctaagattgcggctaatccttcagcgcggaaaccgcgttttaagtcattacttgtgatattacgaccgacgatttcgccaagtgcgaagaaaacaccgattgattcgatcatcgtggttaaggctgccaatgacatagatgcgattgacgtccattcaaaccgtggtgtaccgaagtagaagagttctggtagtttaaaccagctagcttggccaactggatcaagtgaaaccaatccgacagcagcgccgactaatgtcccaccgataatgccgattaaaattgcaatttgttgaatgaagccgcggccccaaatgctaaaaattaaaatcagaacaatcgttgaaaaaccagcgattaagtttgggacgctcccaaatgacttagcagtaatatcgccaccaccaagattttggaaggcaacgggaattaaagtgaagccgattaaagtaattaatgaaccagtaacgattggtgggaataaccagcgtaagcgggcaaccacaccagaaattaagaggatgaagaccccagcgccgataatactaccgtacatgacgtcaatccctaattgactgttagtcccgatagcagttagtggaccgacgtattcgaccgcacagcccaagacgacgggtaaagcaatcccggttaaaggtgttcgtttcaattggagtaacgtggcgatcccacacatgaaaatatcgacagagacaaggtaagtcatctgtgcggcgttaaagtgaagtgctgcgccgactaataatggaatcaggacgtcaccagaatacattgctagaagatgttgcaggcctaaaatggccgctttaatatgagaaagctttggagctggttcaatggtacgtgctgagtcggactggaaatctgccacaggtgtccctccatatctataggttaaaatttatttaatatccagtttagcacacgctttgggcgacttcaattagaatatgactaaaaaacgaatataataatcgcataaactagcgatagttcgcctttaaatgatagggtagtcgccacattctgataaaactgcttacttactgaatgttaaaacgaataacactgtaaaatgttcctaatattcggaaaaaatttgttccacatgaaacggaatcgattgatggccgtcccttgttttttagacttacttacgttaaactaaattgtatacgtgaaacaataaatgttccacagattcagcatacaattaagctagtaataagaggagaagcaatgacaccaaagacatttgtcgcgacattgaaagaacatcaaattgatgtttcacaaaaacaattagaccagtttgagatttatttcgaacggttagtggctaccaatcaaaacgttaatttaacggcgattacagaaaaagaagccgtttatttaaaacacttttttgattcggtcgcaccaaccttatacttggaatcattgagaacgatgcccctcaatatttgtgatatcggtgccggtgccgggttcccatcattaccgatgaaaatcttgttccctcaattaaaggtgacgattgttgattcattaaataaacggattcacttcctagaagaattagtagccgaattagggttaactgatgtgacactcgtgcatgatcgggctgaattattcagccaagttaagcgcccatatcgcgaacaatttgatatggtgacagctcgtgcggtcgccccaatgaacgttttagcggaattctgtttacccgctgttaaagtgggtgggcagttcgttgctttaaaggcgagtcaaagtgacactgaattagcggaagccgcttttgcaattgagacgttaggtggtcagttaaaagaagatatcgcgtttaacttacccgaaactaacgatcccagacatttagtaattatcgataaggttcaatcaacaccagataagtatccacggcgcgcgggtgtgccggttaaaaaaccattaatggctaaggaggagaaataatggcaatttcattttttggtaagaaaaaagaagaaacaagttcaagtgttaatcaggtggtaatggtaccagttgctgcgatcgtaccgaaccgtttccaaccacggaaggtttttaatgccgatcacattggtgaattggcaagcaccatcgaacaacatggtttattacaaccaattgttttaagagaatatgaagatcaaaagtttgaaatcatcgctggtgaacggcgttttagagccattcaaaccttgaaatgggctgaattaccagcaatcgtccaaaagatggatgatcatgaaacagcttcaatggccttgattgaaaacctccaacgggaagaattaacggcagttgaagaagcagatgcttaccaaaacctcatgaagttaaacggttttacacaagctagcttggctgaaaaaatgggtaagagccaatcatttgtcgctaataaattacgactattgaaactctcacaaccagttcaagaagccatcatgaatcatgaaatttcagaacgtcatggccggagtttgttgaaattagatgaattcaatcaacaaatggtcttacaccaaatcctagcggaacaattaacggttaaggatacagaagccctagtcgcttcaattattaacccagaaccagccgttgaagaagaagtggcggatgttgaagaagaaccagcaaccattgaagaatcaacagaaacacctaaaaaggctggcaagaagaaggcgcctaagaaagaaatgacgacagctgacacgaaagtggccgttaataccatcaaaaaatcaatcgaattgattgaacaaagtgggattccagtttcagcagtcgaagacgatcaaaaagacgtttatcggatcacaatcgaaattcctaagaaatagggaggcacattatggcgcatgttatttcaattgcaaaccaaaaaggtggggttggtaaaacaacaacgaccattaatttagcggtttgtttagcagatgcgggtaaccgagtgttaatcattgattctgatgcacaaggtaacgcaacgagcggtatcgggattcaaaaatcacaagttgaaaaagatatttatgatgttttagtcgatgaaattccaattaaagaagcaattttgaaaacaaatcatcagcacgttgatattgtgccggcaacgattcaattagccggtgcagaaattgaactaacggcccaaatggcccgtgaaatgcgtttaaaacttggtttagaagccgttttaaacgactacgattacgtcttgattgactgtccaccttcattaggacaactatcaatcaacgcctttacagctagcaattcaattttgattccagtccaaagtgaatattatgcgctagaaggcttgagtcaattattaaatacggtccgtttggtgcagaagcattttaatccgaaccttgcaattgaaggggtcttattaacgatgtacgatgcccggacaaacctaggggcccaagtgattgaagaagtgcgcaagtactttggcgatcgcgtttacgatacaattattccacgcaacacacgattagcggaagcacccagtcatggggtttcaatcattgattacgatcctaaatctcgtggggctgaagtttatcaagaattagccaaggaggtgttagcagctaatggtcaataaaaatggtaaaggactcggtcgaggactcgaagctgttttttcagcatttgagggaccaaataagaatcgtgcggatgaactcgttgaagagcttgccctcgaggatattcgtcctaatccttatcaaccacgtaaaacgtttgatgaagcggcactagcggaacttgctgcttccattaaaaaatcaggcgttttccaaccgattattgtgcgtaaaagcattaatggttacgaattaatcgctggcgaacgtcgtttccgtgcttctaaattagctggcaaaactacgattccagcgattacccgtcaattcgatgaagaagcgatgatggaaattgcagtcttagaaaaccttcaacgggaagatttaacaccgctagaagaagcgcaagcctacgacacccttttgaagaagttaaacttaacgcaagctgaagtgtcagaacgcttaggcaagagtcgcccttacattgccaactacttacgcctgttgggcttgccagcagatgttaagcaattgttgcaagaaggccaactctcaatgggacaagcacggacgcttttatcattgaagaaaaagagtcaaattagcgccctcgccaagcggacgattgccgaaagcctaacggtgcgccaattagaacaactcgtcaaccaaatgaatcaaaccaaagcggctaaagttgctaagactaagattaaatcaccttacattcaagcgagtgaaaaccaattagtcgataaattcgataccaaggttaatattgcgatgaacagtaagggccggggtaaaatcgaaattgattacggcacggtagaggatttaaaccgaatcttggctttactagatgtcaatattgattagattaaggagacatttgtaatgtatgcattaggcgatctcgttcagatgaaaaaacaacatgcctgtggcaccaatcgtttcgaagtggtccgcttaggaatggatattcgaattaaatgtatgggctgcggacacgcggtcttattaccccgccgggaatttgaaaagaagcaaaagaaagtgctggttgcagctgccgatgttgatacaacaacggaaccacattatcaattgttgtcaaaaggtcccaatcaaactaatttttaacgtaaaggaaagtgtaaaaaactatgtcattaactgcaggaattgttgggttacccaacgtcggaaaatcaactttatttaacgccattactaaggccggagccgaaatggcgaactacccatttgcgactatcgatcctaacgttgggatggttgaagtacccgacaaacgtttagaccggattcaagaaatcattcccgctaagaagattgttccaacgacttttgaatttaccgatatcgccgggattgttaagggcgctagcaagggtgaaggtttagggaataaattcttggaaaacattcgccaagtggacgctatcgtgcatgttgttcgtgcttttgacgatgataatatcacgtctgtaacggggactgttgatccgttagacgatatcgatacaattaacctagaacttagcttagccgacttagaaagcgtcacaaagcgttatgcgcgtgttgaaaagattgcccgcactaaggacaaagaagctttggctgaatttgaagttttaaagaaaatcaaacccgttcttgaagaaggcggctcagttcgttcaatcgaatttaacgaagacgaagctaagatggttaaagggttcttcctattaacgtcaaaaccagtcttatacgttgctaacatcgctgaagatgcaatggccgatcctgatagcgttgattacgttaaacaaattcaagattttgcagctaaagaaggcgcagaagtaattgcgatttcagcaagaactgaagaagaaattgcctcattagatgacgctgataaagctgaattcttagaagcagaaggcgttactgaatcaggtttggataaattaatccgtgcttcataccacctattaggacttgcaaccttctttaccgctggtggcaaggaaacccgtgcttggactttccgtcaaggcatgaaagccccacaaactgccggtgtgattcattccgatttcgaacgaggcttcatccgggcagaaacagtctcatttgctgatcttgaccaatacggttcaatgcaagctgttaaagaagctggtcgtttacggcttgaaggtaaagaatacatggtcgaagacggcgacattatcgaattcagattcaacgtttaatttgaggaggagaacaattggctaagacagaaccagcagtagaaacagagcaagtggatgttgacgcgctcagtaaacaattaagtaagaaaaacgcggactatttatttaaattcaagcgtgctttaaaagaagaagatgtttcagccgaaaaacaagctgaaatgcttgctgaaatgttacccgaaatgcttgaagcacaacacaaaggacaacccgcaacgcaaatttacgggccagtcagcacgaagattaatcaattgttacatgcgccaaaagcacccgttaaaacgagtttacaattacaaatgctggataatgctttgattttcttgattatgtatttagctttcaacgggattgcagcgcaattttcaagcaagaattcaaatgcaatgattgggattacctcaatcgtgattacagctgcgatggccggcgttatcatgacttatccaatgcgctatacacaaatgcctaaggaacaacgcccaccattctggaagatggcgttaatcgttgtcggtttaaccttggcctttgtcgccgcgtatggggtgacaatcttaattccaggtttcatgaacccagtcttaccagcctggattcaaatcgtgattgcggcattattaatcgtagtccggatctatatcaagcgtcgttataagattaccggcactttcttcgggtagtattgcccgggaaattaaaaagagggagacagatgaatgattagtatcgaagaacgccaatttggcgccgtcagcacgttaattgtgacgccgggtgggcaagaacaaaccttgttaccaacggtatttgtctatcacggttggacgcatcggaaggaatctgaattgatgttggctaactttctcgctaaagcaggttttcgggttgttttaccggatgctaagtatcatggtaaacgtcacggtagccaaatgttttcagaattaatgtttgaattctggcagattgtgatgcaatcagtcgatgaatttggcccattagtcgctgcattacaagcggaaggcttagttgacccagaacgcctgggtgtcactggcacatcaatgggtgggattacaacggatgctattttagctcattatcccaacgttaaagtcggtgttgataagattggctcaccaatgccggttgcttttgccaaatggcaaaccagtcaattaccacaatcgattcaagaacggtaccaaaatcaaattgaaacgacactcgcagatttagcagaatatgatttggcattaaatgctgagcgcttagcgggtcgcccactccatttttatcacgggaccgctgatccaatggtgccctaccaatttactgctgatttcatcacgcagattactgaagatgaaacaccggcaacaaaacaagttacattgacgactgaaaataatggtcaacataaagtatctgacgaggcccaactggacaccgtcacatttatgcaggcccatctgaaataaaaaatagctagcgattggccgatgtcggtttaatcgctagctatttttatgcaaacaaaaagtcggtcttggggggaccgactttttgcagatccgaagatctaaaaaggagtaagggttttacagattattttggggggataatctgtgcggtgaagccacgcttcaccggtattttactttggaggagtaaaatgaaaaagttaagtagtatgaaatagaaaagtatcgcttttctatactcataactataatggggaaatgtgaagattctgtgaagcgcactttatagatttatgaaaaaaagaataaggaaagtttaaggtaaaaatagtatgctaaaataaagtatattcaaagggattgaggatgaaaatcgatgacaaaaggaacagttttatttgatttagatggtacgattgccgactcacaaaagggcattatcaatgccttagagtacatgattgaagaattggccttgccaacgcaaacgacggcccaattaattagttttattggcccaccacttaacgaaacaatcatgagagtctttggtttagatgaagcagcgacgcaacaggcgattaaaacattccaagaatattatgcgcctaaaggcttatatgaaaatgaactttatccaggcatgcacgaaacattggcagccttacaagcacaagatttacaattggcgattgcaacgtctaaacctgaaccttttgccaagaagattatcgaccacttagagttaacgccttactttagcggtgtctacggtgcaagtgttgatgaaacaacgcgggttaaaaaagcggatgttatcacttatgcgttggcagaacttggtttattaacgaagaccgaaccactcttgatggtcggcgatcgtcaaaatgatatccttggtgccaaacaaaatgaaatggcggctgttggtgtcagttatggtttcgggagtatcgccgaactgaaaaaagccggtgcggtccaaattgtgacccaaccgactgatttaattacgacgttacccgctaatttgaagctctaagcgtgtttttgcgcattagcgactaataacatgtagattcggccaacatcacgtgagttaccgcggagttcgtaatccgcgatgaaggggacgttaaactgttcggcatagcgtttagcagttaagcaatattgttcgttgaaattacgattgccactgccaatcacgccgtaacataaatcagcattatgcccataagcgatatattcgcctaagctgttggtcatcaattctttgacgccgttatcgataccattgccgccatctaagtatgtgggcacaaaagcgtaaaagggttctgtttcatccttaaagggggttgcatctgaaatctcagttaatgaaatagtaggcaaagccgggttagtggtatgttgttgttgcgcatagtcttgtaaatcggaaacaaaagaacgggtattaccagctagtgaaatatataaaatggatagattagtgatcattgaagtgcctcctgtgaacgatactatatactcactgtagcatttaataattgatatgcctagtcttaaaatttaaggataactgtgaaatcgaaaggaaaaatacgatgacaaatatgagtcgacttgatcaaacgccaaagacgacaagaccgaataagggtctcagccgttttctgacttttttaattttttgctgtgccttcttcgggattggcggcatcattttaaatcaaacagtcttaaaagaatcattcacccaagaacaacttaatcagccgaagaccttgaaactcgtgacaaacgaattcaatacagtcttattagatgcggcgcaaaaaaatggcttaccgcaatcggttcaagtccaattgctctcaactgcagacgttaaaacggatatgactaagaccgttaagaacatctatgcgttcaaagatcggccattagatagtgatcaaatggttgaacaaatggctgggaatttaacagcggcgattcccagcaaccccattgaacaagctttagtcaaaacggcggtggcggctgttcaaccaccattgaagacttatttaaatgatcaaattcaaacgccttatttggcaccaatggtttctgaattggccatcatgacaagtgtcgttaacatagggatgtggattgcgattatcatggggatcgtcttattaatcgtccaatatgcagtcagtgggaagttccgctacctattcgggagtttgggcgcagcacttgcttggagtggcttattcctcctcttagggactgaaacggccaaattcagtggcttaattgaagaagttgcccaacgtgctggtgaattcaatacagtcattattaactatgcaacaagcgttttggattacgcttggcaaatcagcctgatcacattggtttgcggggttgttttgtggattctagcgaagattttccagaaggttcgttaaccaaaaaaaggtgtgaggacgaaagtgactttcgttcccgcacctttttttatttaataagccgtgatgacaatttggtggtcgagataattggccatgtagatctgttgtagttcgtacccttgttgggcgatatcagcgagtaaccagtcttcatctttgtcgattaaacttaatgcatcgacgttgatttgcccatccataatcagtgggtatttgattgttgcgtcgcctttttgggtaatcgtcagttggccgttttgttctagaattgctcgttgaacggtccgaatatcgctaatcccggcaattctgagtttaaaagcgagatcttgggctgacaagctgtttttggcagctgtttgggcatcgatgtggccattagtgataatcgtttggggaacgccgatcacccaacgtttaattcgttgattatgtgtggttaggaatttcatggtgaagacaattagcgtccagattaagagcacgaggaaaaattggataaacgagatatcggcgttataaatcataccgccgacaatcccgccgaggacgtaattttgaagttgatcgatcccactggaaggggctaagttacccttaccagagaggttaatttgtaaaacgaggcagaaaaatccgagaataagtttaattgtgatatctaaataagatggcatgtggctgactccttattgttggtaggttattttagggttgatgacttgtgctttttttagttggtaactggtaaaattattgtcgaaaaccacttgatagtagtgctgatgaattttgacgaccatattttgttgaagcgaagtggcattgacggaaaccgatttgaccggtactttctgtgcctgagcaatgctcttcatgaactgcgtcatttgtgcttgttgtgagtgcgcagtattgagctgttccactcttgtatactgaataccaccgagcaaaacgccgactaagacgaagataatcaagaggtcccgatattttgaatcggaccggtgacgtaggtattggacaaagaaaatgagaattaaactcccaacgagcagtgagagtaatattttgaaatagaactcgaaatcattttgattgatgaaataagaataacgataaaaaagcatcgaaacgcctcctggatagataagtactataactattgtagcacactcactgtgagcatataaattgtgtaaaatctaaatggtggtaagctaaacgtatgaaagggatgattaatatggtattaaaaataacagcagcagctcaagagaagattcaaaaacagatgacgactgatcaagcattattactcgacttaaatgacggtgtcggccccttctcaaaggttggtttttgttcattagatactgattttcgtttattaattgtaccaaatgatgcggatctaaagagctatacagaaacgtttgactcggaaatgggccctattcactataaggcatatacggccgactattttgacggtcacgaggtcctcgatttagatgaaaaacgccaagtattaaccttagttaataacagcggtgtcgttgataatcgggtgccaattatcgtttttgatcatgaaaaaataacagaatagggactattttaaaaagcagtgtccaaaggcgacactgctttttgcttgcttgttatttcaggattaaggtgggataatggcaagaaatagtgttacaaaggagtcttacatgaaaacggcaattgtaacagatagcgccgcttaccttgatcctcaggttgcgcaagccagtcaaatcatcgttgtaccgatcacggtgatttttggtcaacaaacttatttagaaaatattgaaatttcaaccactgaattttacgaaaaaatgcgcaccaccgataaattaccaactacgtcccaaattacaatggggcaaatgcagatggtttttgaccaactgatcgaagatggtttcgatgaagtcatttgtattcatttatcgagtgggattacaagttttatcaataacctgcaagcttatgctcgccaagtcgaaggtattacggtttatccatttgattcgaaagttacgagtgctggcgaagctttcctagcattagaagcagcgcggctagtggcccaaggcgaagacgctgaaaccatcatgcctaaattggctgctttgcgggagacaatcggtgtttacttcgtcgtcgatgatttgagccatctgatgcggaccgggcggatttctaacggggccgcctttgtcggcaacttattacggatcaaaccaattttaagtttcgatacagctggcaaaattgttgcgttgaccaaggaacggacgaaaaaacgagcctttcaaaaagtgttaacggattttgaagcagccgtggcagccgctgattatccgattcgtgcgtgcgtaatcgatgggaataacccagaagaaagtgcgcagtgggttgagaccctgacgaccaaattcccagggatgccaattgaaaccagtcatatcggaccagttgttggggttcacactggtgaaaaggtgatgggcatcatttggagccgcgattatctaatttaaagcgattaaaaaggcgtcgacaattatgtcgacgccttttttgacttttaaagtgttgtatctgcacgttgtggattgacggaaacttcaaaccaatcaatgtaaccacggttaaattcagcgaccgttaaatcgaagcggtcaattgaaacaacggaatcttgatgtaagttagcgaagttttccaagacataaccggcaacggttacgctatctgatgcttcaaaggcttcaatatctgccttgaagaagcgttcaaaatcgtaaagcgttgttttaccgctaacgcgataacgattgtcatcttctttgatgatatattcatccgaaacgtcatcgatttcatctttgacagtcccgaataattcttcgtaaatatctttatcggtgacaatcccactcgtcccaccgtattcgtcaacaacgaccacaatcggtgtttgtttattaatcatttgcgttaataaactatggattggtgttgtttcgggaacagagatgattgagcgaagtaatttgctaacgcggattgaatcatcgacttgtgcttggcgcaccaagtcgtaggcgtagacgtaaccgagaattttatctttatcattttcagcgaccactgggaagcgactaaatccttgttggagataatccttaacaacgtctttgacggtatccgtaatatcgacgacgtataaactagtccgatcgaccatcacgtctttggcaattcgatcgttaaaatcaaaggcccgttgcatgtaaactaaatcgttgcgatccaattcaccaccggttacggcatttttagaaaggctgatgatttcagcttgtgataaaacatcgctactttcgtcagcaggtgcaaaaccgatcagtttaacaacgccgtttgcggaaacatttagtaaccagacaaatgggtagaaaatgatgtgacagtaatgaagtggcttagctacggccatcaacatctgcattgggatatcgatactgatattcttcggtacaatttcagtgaagacaacttctaaataggttaggactaaaacaccggccactgcaccgataatgtgcaggccgctctcagagacaagatgcgtcaagcctaataagtcaactaacactgtttcgacagttgattcaccaatccaccctaagataatccccgcaacactgaccccaacttgcgtggttgaaagatactcattgagattttgagtcatcttaagggcgagttttaattttttaggactaccatttccggaatgaatcgcatcttctaaggcacttggacgtgtttgaacgagtgcgaattctgcagcaacgaaaaaagctgctagaaagaaggtaacgagcatgacgaacagattggtaaatatctgaccacttgacaatataattccccatttcttaaatcattaatgctatcttaccattttcgaacgttcaacggtaaataacgtcggtcataagtctgattttctgatatatcataatgaaaataccataattaatggtggaggtaaactacattttgtaaacgacattttttaattaaaggctgttcatataaaaagagcaaacgacgtgtcaattcacgcggctgctctttagagagagtatctttagaaggttgctgtatcaggatctttggctttaccaacaacaccatcgagttgatcgatagtttgcatgtcttcaggtgttaattcgaagtcaaatagttgcgtattttcttgaatgtagttggcgtgaactgattttggtaatggtaagaaaccgtgttgcaatgaccagcgcaatgcgatttgtggaattgagcgttggtatttagcagcgagggtcttcatttctggcacatcaaagattttaccagtgccaagagggctgtaagcttctaataacagaccgttatcgcgtgagtattgcactgtttcagcttccaattcaccaggtgctaagaagatttggttcaccattggttgcaccttagcggtctttttcaaggcttctaagtggtgtgcacggaagttgctgacaccaattgccttggctttgccagcattgtagagttcttccattgctcgccaagtttcggcattggctgtttcccagttatcacggaaatcaatggggttaggccagtgaatcaataataaatcgacatagtcggtttgcaatttttgaagtgattcttcgaaagattgcattgttaaatcgtagctgtgattagcgttccaaattttagttgttaaaaagaggtcctggcgtgccacaccactttcttggatggcagtgccgacgctggcttcgttttggtaagcttgggcagtatcgatgtggcggtaacccgcttcaagtgctgccttaactgatttaatagctgtgtcgccatctggtgtttgccaagttccaaagccgagcacggggatttgaacgccgtttgctaacgtataagttgttgttaatgtcgtcatttaaaaagcactccttcttgaacagaattgattacagggttaattttacacttttggtttgtttttgagtaggaaagtgctttttattgcccgggaaatgttgccgtttgtaacgctaataatcgtttttgtaaagcgggatcgagggcgtagaggtaaagaccgttgcgggcccggctcatcaagacgtagagactattgaggatgatttgagtcttaatctgggttggattatcaaagcgattggcaccggcaaaagccgcttgatcctcatagtattccggtttgatcagtaagcaatcttgttgtgggtcatagccaattgacgggcctaaaatgacgccggcatagtttaaatcgaaaccttgtattgtataaaccgaaccaacttcatcaatactatcttcacgttccgcccaataagtcttggcggttggttgataccgatcccagcgtaatttgaaatgcggggcacttacgtaatggtcgtgcgggtcattgagtgttgctggaaaatcataggttgccagtaaccgggccaaaccactgtcttgattacgttggcgaatagcggcgtacagttgggctgcgtctgcaaaaattttgaattcgaaatgtggatcttggggtaaggactcgatttgctgcttgtgaaaggcttgtaaccaagattcaaccgagggatttgcttgaattcggaattgatggtgtagctgtgctaattgataaggcccggtttggagtttagcgagtagctgttgttgttgccaataacttttgaccttaaggacctgttgttcatcaaaaatgagaatcgtgatgcgactgtgcttgcgaatctcgtctaactgattatcctgtctgaagtggttataaggatcgctgtgcgtcaataagaggtgcgcttcatcgactaaaacgatatcggcgcgggtctcttgtttgctggcctggttgataaaagttgtcgggcgttgaaagtcttttttcaagagcgcgttagttggttgaacgttattttggtagagtttcaacatttctggatgattaaccagtaatttgttgttggtttggtacagcggtgaagtcggcgttttacgtgcaagttcttggagcgtcgagaagacgctgtttaaaatcacacttttaccggttcctgcggcaccttgaattaagaaggtggcgtggtccgcatcacgattttgttcacaaaattggataattgcgattttgagttgctgttgctcggtagtaagttgattagccgggcgtgtcaatttgtagagggcgctgttttggcgctgagcattaggcaaaaataggacttctttctaaataacgtgataaaagaacccctgacaatgtatgccagaggttctctagtagtgattaatcgacaaagactaattggaattcgtgttttgctaggtcgatattgactgagacgtggcggtttaagtcggccacaatttggtgggcaagggtgacgcgttcttcgaagctctgtgcataggcttcaaaaacggtacctttaaaattaaagttttcagtgataaaaatggcatcggtcacaaatagcagattattttcatcgtggcgtgaaccagcttttaaggttgtgtcgatgtaatgatacaagtcggttggatcgaagtttaacggtttttccaagattggtttgatttgaaagccagctaaatcgtcaaccatctgcgcattgagcgtcacttgtgttagagcttgatataatttcataatagacaccttccttattgtgaattaataagccaaatttgattggttaaccttattataacattttgggaaacgctagcgtgagtcataaccttagcgtgctgctttaggccggtagagcacaaaatgaacaagcaaggcggcgatttggcagccaagcgctagataacaaacagctgcccaaccaccgagactccaagcaagagcgccgaaaaatgagccggaagccccaccaatgaagtaggcaaacatgaagaccgtgttattacgactgctggtagcttcgcctaaggcttggacccgcgtttggttggacacctgaccacactgattaccaacatctaataaaacgatcccgagcatcataactggcaaatactgtccccagaaaaggaataagaggtaactgacagtcatcatcaagagaccaactgcgatgataaaccgcggcgtcttttgatcggcaaagcggccaatcacaggggccgcaagcgcaccggctgcaccgagaatggctaataaaccaacggtgccactgccaagatgataggcaggacttgccatgtaaaagacgagggttgaccaaaagatgctgagggtcccaaacatgaagaagccgttaatggccgcttcgcgtaaaagtggttgggtgcgcactaaaccaggtaaggaactgatggtttgccaataactaggcccgtttttgggacgcgaatctttaggtaatttgacggccgctaagataatcaggcagccaatcgcaatgacggctaaaaggtaaacccagcgccaattgacgtagctactgataatgccactgaaactccgagaaagtaaaacccccattaagaggccacttaaaatcgttccgagcacggcgccgcgtttttggggtgccgctaaaacggctgcatatggaatgataatttgtgggacgactgaggttaagccaatcagtaagccggaaagtgcgaataagatgaagttcggcgctaaaaaggcgactaacaaagatagtagcgataaaatcagcatccgaatgattaaatggtaacgactcatgacatcgccaaaagggacgattaataataagccgagggcataaccgacttgagttaacatcgcgaccgtgccaatggcgccagtgttaacgtggaaggtttgggccaccagagattgaatcggttgaatataatatagattagaaaccgcaacccccgtgataaaagccattaaaagaatcaatggttgtgtgagttgcgtctgttgttgcttattttgcatgtgctaaggagcctacctctcttcaaaacgttcattgagaattaataatgctttgtgaaactcgacttgggcttcaggttcttcttctttatcagcggcttgttgcaagaagtctaacatctcaggcgtgacatctctgaccaattggcctagtgcccacgccgcagtcccgcgaataacgggtcggggatcgttatcgattaattgcaataactggggaatcgcagttcgatctttgacgttggcaagcgcgataatggcgttgcgctggattggcttttttcctcgccatgaaccggataagtggccgaatttaactttgaattctttattgctgattgttagtagtggttgtaactctggcatcactacttctggatcgggttccatgtcaggatggaagtggaagtccttgcctttattaaaaggacaaacttgttggcaaatatcgcagccataaatcacgctccggattttagggcgaaattcttctggcataaagccttttgtttgcgtttgataagaaaggcaccgtgtcgcatttaaccgaccgtcacctaatagggcgctaggcggacaataatcgatacagcgggtacagctgccacattggttggccataggggtatcaggttcaaacggaatattggtaatgatttcgccgagatagacgaaagacccgaattcaggggtaatcaataatccgttgaggccgataaaaccaaggccggcgcgttgtgcaacggcgacgtcactcaattcgcctgtgtcgaccattggtttgaaagtgacttcatcatcctcatcggcaagttctttgatcgcgtcgattaattgggccatcttgtcccgtaagatatcgtgataatcaatgccccaagaagcccgtgcaaaactaccgcgtttagcacctgttctggcgggtttgttgtgaattttggttgggtaagcaagcgcgatggcgataattgatttgggttggtcgaaaatcaattcgggatagaggcgttcttccagcactttgtgttcaaaaccgctagaatgaccgtttttcttttgttcgattaagctggcctctaaatagtcaaaaggcgccgctgaggtaaagccaattttatcgatgccaatttctcgactggccgcgatgacttgttcttttaaagttggcataatgggactccttatttgtttcggttacattaagtaaattttttgtaagtcagttaaatcatgattggttagttgtaattcagtcttgaggtaattttgaattgtgccggattcttggcgaatcgccatttgggcggtttggagataatccaagtgaacggtcaataaggattgaacgctttggtaaatgccttgataggccgtcttttgttggaggcgctgtaaggacttctgcacaaaatcagccgatgcgaggttagtgagcaggtaatcagcttggatcgtctctgcgggcacattaagggcactgagtaagaagacagtggccatgccggtccgatctttgccagccgtacagtggaaaagggttgtttgatgatcttgatcgttggcgagtagtaattcaaaaaagcggcgataagcttgcttagaatggggctgattgatcaagttatcgtaaaccttttgcatgcgggtgtggccgctgagtggatccttgctgaagagttgatagagttcatcctgactcgctgaattggcagtttcatcgacggcaaaaacagggaggaattcgtaagtcgcattagcgggtagtcgatcgggtgctttggctttttcatcttcagaacgcaagtcaatatcatagcgcaaaccgtattgatcaagatagtttaaatccgcatcagtaaggtgggctaagttggctgagcgcagtaatttatgccatttaagcgtgcggccatcagttgtttgatagccacctaattctctaaagttatggcctttttcgagtggtaaaatccgttgtgtcatctctaaaacctccctattttcgtatagatttattgtagcatatttactattagcatgactgttacttgtcaactgtgtaggaaagctcgtatgataagaagaaaagggcggagacggataaatgattacctatttcgaattacaaacgactggtgagatccacgaaaaccgctcggaaaaagcggctaattggattcattttgaagatcctagcaagcatgagatgcagcattttgcgcggaagtaccatttgccacgcatgttgtttgaggtcgcccaagatatcaatgaagtggctcggtatgaaacgtttacgacggaaacgggtgaaactctcagtcatatttgcttgttagtaccggtcaaaacccatgattctgaaaaacatgctgaatacattacgcggccgttttcatttatcatcagtgggcaaaccttactgacagttgggcaccaacaaagtgaattggtggccgagatgcaacggattacgggaactgatcaacaggtcgaaagcattgtgttacagagtatctcgttgatttaccaacgctatttgaccgctttagatgtggtcgcccaacagattcatcagttggagaaaaacgtccatatttcgacgcggaatcaaattttatacgcactcaaagcacttaaaaagagtgtcgtttacttggatttgggtttaaaaagtaatcagcagagcttaccgcagattaaagagacggcgttatttgaagaagtggctgatcaaaaagatcgtctttaccgcatcgatttacagtttgctaaatcagataaggcgattacgacttatcgcgctttgttagaacaattaagtgatttattatcagatatcatttccaatcgtttgaataacatcatgaagacgttgacgtcgatttcgattgttttaacggtccccaccattattggtggtttctgggggatgaatgtgccggtgccgctaacgcatagtggtaaggggtttatcctgctattgggcttatcgggaattgtgagtgccttggttggctggtggctgaagaagaaggattatttttaaaggatacacttaagaaaacgctattctttttgcttgaattgtccgcgaaagcagtatattcttaatgtagtatcattgtgacattgtgcataaagagaaagtgagatgaacagcatggttcaagaatataagagaatattagtaccagttgatggttccgaagaagctgaattagcccttaataaggcagttcaagtggctaagatgaatcacgctcaagtagatattttaaatgtattagatacgaaacaatatgcagggagttatagcggcatgctttctggagatgctattttccaaatctcagaagacgcacaaaattatctcaatagtttgaaatatgatattcaaaccaatgataatttgatggacgttgaaattcacgtccgttttggcaatccgaagaatgtcatcgcacgtgatttcccatcagaatacaaaacagatttaattatgatgggctcaaccgggttgaacgctgttgaacggatgttaatgggttctgtcacagaatacgttaaccggacagcgatttgtgacgtgttgattgtgaagactgatgtcaataacaatccctacaaaaaataactttaagtaatcaaaaaagccatgacagcacaagttgtcgtggctttttaacgtactttaatgtagaagggagtcgatgaacatggcaagcgataattggatgaatgcgacagcagagctgttaacctactacgaacaagaatggggccaaccggaacacgatgaccagtgcttatttgaactattgtgtttggaaacctaccaagcgggtttgagttggcaaacggtgctggcaaaacgggcggcttttagaactgctttttaccagtttgagattcaaaaagtcgcgcaaatgacgacgactgatattgaccgtttattacaaaatccagcgatcattcgcaaccggcgtaagctagcagcaacggtgaataatgcgcaagttgttttagcaattcaacaagaacaggaaagttttgcgcactatctgtgggattttgttgacgggcaaccaatcgttaatcgaccaaaaacgtgggcagacgtccctgcacaatcagcattatcggttgcagtgagccgggatatgaagcggcagggcttccaattcgttggtccagtgacggtttattcttacttgcaaggtgcgggtttaatcgacgatcatccccagcatctgaagggatagactgtcccttaaatcgcggatggtgtatgatgatagggaagattaaaagtctattttagataatttaaaggagtacacaaaaatggcacaagataacgttcgccaattagcggattggttagaagaaaacatgacggcaattattgatcgtaaagttagcctcaatgtttcagaaatttttgcagtattagatagttttggtgttttgaataatccagtagcaaaatacttggatattacagaagaaacttactatcaatctgaatcagaccataaattaaccttatcagatgaccgtaaattattgatggatgttactgaccggatcatggtaacccacgttgatggtattttagccgataacaaagttaactttgaatacagtcacgaagctgtttatgaagatcaatacttagtgaaacgcgacttagaagtcctcacttacggcttagccgtgattggcgctgttgcggctactgttaaacataacctcattcaagcggacctttctaaggatgctgtcttgagtttggcacttgctgctcaaaatattgcgaactggcaagcaaatcaatagcatacaaacggagttgggccaaaaatcacttttggcccaacttttttaatacccgatagttgctaaacgtgtgctatcagtcatatccttgtggttaacgtcgaatggcaaacgattgctggtgcaatcattcaccattctttgttaatcctcaggatatccccgactgatagcacactctttttttatttatcataaattaagcggtttctagtgaaaaaaagcagaaaatatggcatgattaaacagtaaataagagttgaggagctgttgaataaatgacaaaaattgcaattgccggttctggtgcaatgggcagccgttttggctacatgctacaagcagccgggaacgatgtcgtcttactagacaattgggtcgaacatgttcaggcaattaataccaaggggttaacggtagcgattgcgggacaagacgtgcaacacgttcaaattccagcagccttacccacagcgattaaagacgttcaagatgtgattatcatcttcacgaaatcgatgcaattaggggcgatgctacaatcgattaaaccgctgattggtgagaagacgaaggtcgtttgtttattaaatggcttgggtcatcccgaaacaattgaacgctacttacccaaacataatatcttcgtcggcattacgttgtggactgctggtttaaccggtcctggggaaattagccttagtggttccggcagtgttgaacttcaaaacgtggccccagaagccaaaggtgccgctgaagaattagtcgcgatgttgagtgccgctggtttacatgcgacctatagtgctgatgtcttgttttcaatttggcgcaaagcttgtgtgaatggcaccttgaatagcctctgtgctttattggattgtaacattgcccaactcggtcggacgagtcaggtcaactcattactggcttcgattgtggctgaattttcagcagtggcagcgaccgaagcggttgatttggatgtgccaacaacgattgcgcatatcgatcaattatttgatcccacccaagctggcgaacattatccatcgatgcaccaagatttaatccaacaccatcgtttaacggaaattgattacttaaacggctacgttgcgcgcaagggccaagaacgtggcattccaacgcccgtcaaccaattgattacccaacttgtgcatactaaagaagcactcgtcatcgaaaaataaaggagtccttaaaatgacagaaaaacaacctttaaacattgaagtcacttcaatgcactaccaaaaactattaatcgcgattgatgatgatgatccaacgtcatcaaaacgcgcttttaattacgcttgtaccgtcgctaagatgtatcaaattccaatggggattgtcagcatcttagaaaccggcgatttaaatatctatcaatcactctcaccaaacgtggtcgctaaacgacgggaagaaattgccgcagacctagatatcttcgttcaaaaggcccaagaatttggtgtgcaagaagtgacaccgattcttggtgaaggcaatccaagccacgtgatcgttgaagaaatcattcctgaattcaaaccagatcttgtcatctgtggttcaaaaacaaaaccttcaaaacacttaatcggtacacatgcgagctacttatctaaatatgcccctagctcagtaatggttgtccgttaagaatctaaaagcacccaaacaatttttattttgttttgggtgctttttcgattagaataggattatcaggaggcaagactatgctagaatgtccacaatgtcatattaaatatggtcgcaagctgcagcagtgtccaaattgcggtgcggctgcaatcaatcacgaaacgactcaagccaaaccaaccgcactcaagtatcaccaatttttacaggcgagttggcggcaacccctacaaacaccatggcggtgggttaatccccaatttggctgggtaacttttgccatcttattgctggttaatacggcgacgattagtttattgatggcgggctggtccgaacaagtcggggccgtggccggtgtcactggcacgcaagttatcttacgccagccagtggctttgtggccgcttgaattacgcctctttttaatccaactgggtgggttattggttttagtcggaaccggttatgtattgaagcggtaccttctaaaacaaaaaaacttgcgctttgatcgctatctaactgaaatcagcgcttacgggagctttgtcttattgttgacgttggccgcattgttggttacttttatggcgggcttgatggcgctgtggttagttgtcattctactagtattgggctacctctggttgaacatggcgattgtcgtcagtctaatccgtcaaccaatggcgggcttcgatcaattttacacggtcatcctatttgaaattattgttcacttgctattgcttgtgatgagcagtcaggtcgttatgatgggccttgcgaacctcttttaaaaataaaagtgcgtattttgttacactttttgaaaaagggactaatatagaaagtgtagtaagaaatatttaggaggcttttgcaatggcagtaggtacagcaacattggttttagatatgaagatgtcagaggcatttgactggagcgacgatgcaacaatcgtgagagaagcattatgggaccactacatggaatcaaatggtcacaatacggatcaaacagttgccgcaatgaaaccttacctcagcatgagcgattcagaagtacggactaaagctgaagcacttttaaaaaaataactgaagacaaaaaagtcgccgtgaacaagcaattgttcatagcgactttttgattggatgaagtgtgtggtagcacacacttttattttagacgttatacatataagcacgtgtcattggtaaatcacgggcgctagcgcctttagaaacgaggtattgaataacatcgatattaccagattcaaaagatgaggcacaagcttggagatagagatcccacattctaacgaattcaagactcgtttgttgttggatttcatcacggtgtgcgttgaaattggcatcccaaatttccaacgtcttttgatagtgccgacgtaaaggttccatgtcagcgatttgtaaaccggcatcgacaatgtgttgcgtattttcaaccaagcctggcacatagccacctgggaagatatacttgttgatccaggcgttcttggcgccgccttgttgacgcgtaatgccgtgaataagggccacgccatcgtctgttaagtaatccgcaacatctttgaagtattcagccaagttttcttgaccaacatgttcgaacatgccgacacttgtaatgtaatcaaatggggcgtgttttaattcacgataatcgacaagttcaacggacgcaacgtcactgaggccttcttcgtcaattcgttgttgaacaaaattatattgttcttggcttaaagtaatgccgacaacttttaagtgatattccttagcggcggttaacatcaatgtgccccagccacagccgatatcgagcaatgtccgattaggttgtggattgagtttttgtagaatatggtgcactttgttgatttgagcagtttctaaatcatctgttggttgttcgaaataagcacaagaataagtcatggttttatctagccaaagttggtagaaatcatttcctaagtcgtagtgactttggatatcctttttgctagctttttctgagtgtgattgtttaggtaaaaagtgaatgtaactgtgactgcgcataaaactctctgagctgttataagcggctgtcagtagtttttgaagtggtgcgtcacctttgcctgtcacctcaatatcgcctgccatataggcttcccctaaggctaatgaggcgttgctggttagtgatttgatggggatgagttttttaaaagtaattgctatttcaggctctccggttccgtagacgtcagtactaccatcccaaaagtggacggcgactggaaaatcaaaagagtgttgtagtagtttcttataaaaagttttttctaacattccgaaaatcctttctaggaaaaaatttttaataccaaactagtatacgtttattttaaaaattatgtaagtcataacacttatgtaaggttagatttttcattattcaattaacgcgaagtgttgtaaaatgatgatatgttttagattagggaggaaaacgtgtgactttataccaacgatttgtagcgaacgaacaattacggcgcctagtagttctaatggggatgattggtgttatttttgcggttcgttcaatgatgaatatcatcttgttgacgttcatctttacttttttagttacccaattggtgcgccacgtgcagcgttatgttcggataccaccagccgcggtggttgtaccactctacattttagtgattttattggtctatctcggggtaaccatttatgtgccacaaatcgctaaacaaacgattaaattaggtgaaagtgtttataatttttaccagagtccatcctttgatgccaataaattcatgcaactgatcagccaatacatgaaacagtttaatttgaccgaccagttaaagcatggtgtttcaaccttggttaactatattaccgggattggtacgatgggcgtgacgattgtcttgtcgtttatcctcagtttcttttatacgattgaactggataagttaccacaatttggtgggctcttcttaaagagtacctacggttggcttttccaagatattgcttactttgctaaaaaattcgtgaacacttttggtgttgtgattgaagcgcaaatctttatcgcggtcgttaatacggtcctcacaacgatcacattgacggtgatgaagatgcctaatattccgagtttggcaattatgattttcttattatcaatggtcccagtggcgggtgtgattctgtcatgtattccactatgtatcatcgctttttcagtgggtggtgtgcagtatgtgatttatattctgttgatgattaccgtcattcacgcgctagaagcttatgtcttgaatccgcgctttatgtcgagcaagacacaactaccaattttcttcacctttgtcgttctctttgtcgctgaacgtttcttaggcacgtggggcttgattgttgggttaccaattttcacgttcttcttggacgtcttaggggttaaaacaattaaaacgaaataaaaaaaggacccggcatttagccgagtcctttttgattagtttagtgtactactgatttatgaaagagattcggggcgggttaagttactgtcggcaatgatgacagcgagttgattgagatcaacttgtaattcagtcgcgatgatgaacaacgcttttaatgaaggggcagcgcctttttcccagcggaaaatcatggagctactgaccttaatattgtatttttgcgttaataaatcggctagctgccgcatcgtaagattccgtgaaacccgcttatcatgtaatagttgtccaaacattaaattcaccttcttactcgcaataaaaactatagtactaagtatatgacaaaatacgctaaaaagttaacactttcgtacaaaatcgttaattgacaagtttatctagatgacgtaatattcctaatgtggagcaaagtttgagaatattcatttgggggtgccaaatttggcaggaaaacttttcgtgctatcaggatatttaaagggtcgtgacatcaagcagcaggaagttgctgatgttttaaataaaacgctaacaactgctaaccgtaagattcgcggtaaaattccgtttaccgtcaaggaaattcagttgctacacgatcagctagatgtgccgattctaatcttctttgaatcttagttcctaaagaggaataattagattaggattaagcgggggtaccactagtatttaataataaaaaaacgataagccttcaggcttatcgtttttttttagaaacttattatttttcattaagtaaagctaatttaccattcacaatcatttcgcataaatcagggtagctaataccaagaacttctgcttcttgaggaattaatgataatggtgtcataccaggtaatgtattgccttcgatgacgtataagccagtttcaggactccagaagaaatcgatgcgggcgtagttggttaaaccaagcgcgtgcatggcatcaagcgccatttgtttcatggcttcgtgaacattatctggtaagttgttaggtggtgtgacgaatttcgtcgtgttacctgttacgaatttgtgttcaaagtcataccaaccgtcattgacttcaatttcaatggctggtaatggttgttcgttaatgacacccagtgagaattcgcgacccttgatgaattcttcgatcaaggcttcgttatcaaaacgcaaagcatcttcgacagctggttttaattcagcttcgttgtggacgatatgtgtcccaacacttgaaccaccattacttggtttaaccacaacagggtattcaaatggcatttctggcattggttgatgacgataagcagcgacaaaacgtgctgttggaatgttgttgaagagtaagatttctttagaaacttttttgctcattgtaataccagcagctaatgtgtcactaccagtataaggaatttcaaagacatcgagaaccgcttgaactttaccgttttcgccatcgccaccatggagtgcgaggaatacgatatcagcagttttacaaatttctaagacattcggaccaaatagttgtgttgaaccatcttcgcgaagtttattgatgtcgtcatctgttaaaacttcatcatcaatatcataatctttttcaacgggatcagatgaataaagagagtcgattgtggcaccatctttcaattcattccctaaaaaaagatcgacaaaggcaacatcatggccttttgtttgtaatgcatgggtaatcttgtgtccggacgttagtgaaacgttacgttcagtactacgaccgcccgctaagacaacaattttcatatgaatctacctccgagtatttttggaaccttaagtatagcataaaacgcttaaggcgggaattaaaatgctaaattagggcggttaactattttgggttagcactctatacaaaagagtgctaattacttgcattagacgactaacgcgttaaaatataattgtaattaagataaagaaaggaagttttagagatggcaaacgaattaatggatcgtcgtcaagattggttagatagtttagtaggtgatgactttttcaagaacttcggcaaacaattctttgcaatgtcgcctgaaactgacaacttgttgaaaacagacgtgaaggagaccgataaggattatcaattaacggttgatttacctgggctcaacaagcaagacatccacgtcgattatcaaaacaatacgttaaagattagtgcaaaacgggatagttttaacaatcacagcgactcagaaggaaacttgattcaaagtgaacgtcactatggccgcttcagtcgtcaatattatttaccagaagttgatcgccaaggaattagcgcgaaatatgaggatggcgttttgcaattagtcttaccaaaaatggctgaagatacacaatcaacaagccaaattgaaattcaataatgagtatttcggagtcaccgagtttagttggtgactctttttttatggcaataataataatgcgttttcgtaagggatattgtatggttaaagtagttaataaatgttgaggaggcattaatatgttaacgttaacgcatcttgaaaaaagttttggggcgatgaaagctgtagatgatgtatcgtttaccgttcaaccaggcgaaatattagggcttattgggcaaaacggtgctggtaagacgacaacttttagaatgatattgaattttttaacaccggatagcgggacgattttgtggcaaaggcatgcatttaccagtcgtgactacgatcaattaggttacctgccagaagaacggggcctctatcctaagatgaccgttgaacaacaaattttatattttgcgcagttacgcgggcggaccgcggcggaaattaaaccacaaattgacgagtggttagcgcgttttgctgttaagggccaacgtactgataaggttaaggatttatccaagggcaatcaacaaaaggtgcaactgattgcgaccttaattcataaaccagcgctcattattttagatgaaccattcagtgggttggatcctgtaaatgctggtttattagaagatggtattttatggttgaagtcgcaaggctcggcaattattttttcgagtcatgatatgacgaatgttgccaagattagtgaccggattgtcatgttgcgcaatgggcaagtcgtgttatccggaagtgtcgatgaagtacgagcccagtttggccgcatgaaactcttcttggaatcaccgttaacgcaatctgaactggaacaaattgaaggtgtttcacgtgtaacacgccacggtcaccagtttgaattgacgctagctgacgaagcggttggcaaagagattttcgaacgcgcgacgcaagcagattatattccagaatttagtcaacaagcgcctagtctagacgaaatatttagattgaaagtgggtgagcaacatgactaaatttaagattatttttaaacaggttttctttaaaaatattaaaagtccggcctatatcattatgattatcatgccaattattctattaggggtcgtcctagggatcggcaaattgatggaccaatccaccgaaccagctaagattgcggttctcagtcaacaaccagctgaacaagcagccttgcaacaaatgagagggcaagattacgtcattgatacgcaaattaagacgcaaccgcaagcagctcaagcgttgaaacaagaaaaaattgatggttatttaatcattcagcaaggcaatagccaatattttgaacggaaagatagtcgtgattttgatccgagtggcattcaaaaccagttgaatgaaatgaatattgtgacccttgcgcggcaagctaacgtcccggcggaccaaattcaaaagttaatgacaccgatgacggttaaatccgtgaccgttcagtttgaagctgggcaacaaaaaattgatcaatctaatcaaaaacaagtgggagaaggcatttcattagcgattacagtcttaatgtttgtctttatcgttaattacgcggggattatcgcaaaggaaattgcgactgaaaaaggctcgcgtattatggaaatcattctctcaagtgtctcggcgacaactcaattctttgctaaaattgccgctgtattagcattagttttaacccagattgtcttttacatcctaattggtgtggtgggttatcactacttaaaacaacaattaccattatcggcgattttaaagcaagtcggaccgaacctctggacaccaccggtttggtatgcgattagtttcctaattgtcggcgttttactctacacagtgattgcagcaatgctagggtctgtcgtttcgcgaatggatcaggtgcaacaagccatttcaccgttattaatcctcagtacaatcagttatatgtgcgggtttatcttaacgacgcgttcggatatcggctttttaaaaatcctgagttacgtaccgctcttttcacaaatcatgttaccggtgcgttttgctagtggtgacttaactgcaacagcagccacgcttggacttggcttagcgattatcacgttgataggccttacctatttagcactgattatctatcgcatgaacattttggtctattcagacaagggcgtgatgcgctcatttatgcggtcatttgcaatgctgaaggcggaaagacaaaaataaaaaaacggtcggaatcttcttttagaatgatgccgaccgtttttgattgcaatcgttatcaataattaaagcgcttagactaccggaaagtagggcatcaatggtagaattgaattagaatctgattgaggaggatgacaatgacaaacgttcgaatgcaagatgatttttacacggcagtgaatcaagaatggttaaaaacagccgaaattccagctgataaaccagcaaccggtggctttgtggccctggtggatgaaatcgatcaacaattaacgaccgattttaagcaacttaaacaaacggataatgcgttattacaacactttttagattattatgccctagcggccgactttaaaactcgtgatgaactcgggattaatccgattttaccgtttattgcacgtgtccgctcaattaacaatttaacagaatacaatcaaggcttggcagactgggtattatcaggcctaccaacaccttttggcttgtcagtggatgccgatatgaaagatacggcacaccacgcgctctacgctgaagcggggagcttaattttacctgataaaacgtactacaacgaggggaaccaaagtgccgaacagttattagcagtctttaccgacatgatggtccaactattacaaaaggttggctttgcaccggttgtcgcgactaaaacggttaaagaagcgttggcttttgaccgctcactcgcaccatttgtgaagagcgccgaagaagccgcagattatgcaaaactgtataatcctaaaccactaagcgactttatcgcacaacaacaaaccattgatttcaaacaacttttcagccgcattttgccagtccaacctgataaaattatcgtgactgaacccgtttattttgaacaattaactaaattagtcaacgatgataattttgcccaatttaaggcttggttactcgtaatgaccattcgtgattggagtggttacttaaatgaagaaatgcggcagattagttcaatttatggacgcgccctatcaggtagtaaagaggcgaagccccaacaaaagagcgcctattatttagcgctcggcatgtttaatcaagtcgttggggattactatggccgtcgttactttggggcaactgctaaggcagatgtcgaagcaatggtgaaaaagatgattagtgtctatcaaaatcgtcttgaacaaaatgattggttgaccgccgaaacccgtgaaaaggcgattgtgaaactcaatcatttagggattcatgttggctatccagaaaaaattgcgccgatctttgaaaaattggtgactgtaccccaagctgatgatggcacgttatttgagaatacagctgatttcattcgaacgattgaaacggaaaattttgctaaattaacccaaccagtcgatcgtgcaaaatgggaaatgggcgcggcgacagtcaacgcctactattcaccttcgaaaaatgtgattgtgttcccagcagctattttacaagccccattttatggtttgcaacaaagcagtagtgctaattatggtgggattggagcggttattgcccacgaaatttcacatgcttttgataacaatggtgcacagttcgatgaattcgggaacttgcataattggtggcaagcaactgacttagatcatttcaagacgctatcacaagcaatgattgccgaatttgatggcttagcatttgctgatcaaaaggtgaatggcaagctaaccgtttcggaaaatatcgctgatgccggtggcttaagctgtgcgctagaagcggctaaaggtgaagatgatgttgatttggaagccttcttcgttaactgggcaacaatttggcggatgaaagccacacaacaatatcaacaattactattaaatatcgatgtccacgcaccaaatgccttgcgggcgaacgtccaagttcaaaatctagcggatttctacactacttttgacgttcaatctgcagataagatgtatttagcaccggataaacgcgtcacaatttggtaaattaaaaaagtgcgtttgaaacggtttggctttgagcattagcacagctcggtgaataactgctggacgcagttgtttaacgagtgacgctaggcgcagaagacagtttcaaaaaacacgattaaaaaagtgcgtttgaaacggtttggctttgagcattaatgtcgagtgtcaaagtttagaaatcaaaaagaggtgcatcacaaatttattttgtggcgcacctctttcattggaaatgggggattttgaatgacagaaaaagaacgaatggttaacggtcagatttaccgtgcaaatgatgcggaactacgggcagatatgaaacgggcccgtgttttaacgcgtctttttaaccaaactacggaagaacaacaggcttaccgccgcgaattgacgcaccaattattcgctcaaagtggcgccgatttatacattgaaccaccgtttcgaacggattatgggtgtcagacgacaatcggtcaacgcgtttatatgaattatgattgtattattattgatgtcgcgccagtcacaatcggagataatgttttctttggcccccgagttggtctatacaccgctggtcacccaatctcggcacaaggccggcgtgatgagttagaatatggcaaaccaatcacaattggcaacgatgtctggctgggcggcaatacggtcgttaatccgggtgtgacaattggcaacaacgtcgtgattggttccggatcagtggtcacaaaagatattccggataatgttatcgcagtcgggaatccctgtcgcgtattacgaccaattgatcaagtcgaagaggattactgggcccgcgaaaaagaacagtactttgcagaaatcgctaacgattagttttccgatgacctacaacttgagcgatacagcataaaattaaccagaggcagatcatcaaaagaacggttgttcctagggggaaatcaaagtgctgcaagccataataagcaattgcccctaaaagccaaccactaaagttgacggcgattggcaatcgacggtagaaataattgaagaagacaatcgtgtagagtggtgtgaaggctgcgctaatgagtgtgagaaagagttcatatttgaagagttgttgattagcgattaagcccaacccaatcaatgtgacgacgatccctaagccattttctgaataacggattttagggaacaggtttttgagattaacgccagcagaataggcatccaaaaaggtcgtcgtaatggtcgagaagatgatgataaataaaattaaaaagccgaagcgactagttgctagaaactgattaaaatcagtatagccagtcgtaataatggttaaaaagcctaagaaaaacatcattagactaccaagaaagtagccgctagtactccataaagagagtgctagtggcttttttgaatccttggtataatccgcaattaatggtaaccaagaaagggccatcgcaatactgagctcgatggcagccccaaagctcagtggattggcactcagatgagtggtgtgaccagcaaattgactgagttgccaaaaaaggcccaggcaagcaaccactaagagcaatacgatggagttgtttagcttgaaaaagaattgcgttttaattgccaaccagaaaataattaagccagccacgataatggcattcatcagataactgaggtgagtcagcttgagttgctgcatggcttgggcggcattagcaatcatgatgccagtccacccaattaattgaatgacgtttaaaatcgcaaagaggataaaaccgattttaccgtaaattgggtctgttaactcaatcgcgttttgatgacgcgtgccaccgagaaaactagccggtaatagcaataaaaaggcaccaatcaggtgaccaatgataatggctagactgcctttgacgagaccaaggggcgcaatgagtgtcccagtgatgatttccgcaattgaaatagccgctccaaaccagagtaggaattgattatgattaactttcatgattattcccttctgagctctgccaaggttggtttaatagttggattgcttggggaatatttttagcctgtgtaatagcagaaatcacggccgcccccgcaacaccggtctcagcaacttgttggcagttttttaaactaatgcccccaattgcgacaaccggtaactggctgagttgcgtgaatgtttttagttgtgctaaaccgagtggtgttttggcatcttctttagaattcgtcggaaagatggggcctacaccaatataatcgagcgccggttgttgatgactgcttaggatttcttgagcagtatgacaggatagcccggtaattaggccgtgttgcttggcaacttcaattttaggccatggttgatcagattgcccaacatggagtccgtctgcttgcaaatctaaagctaattctaagcgatcatcgataataaaaggcacgtgataagtacgacaaagtgcttgcgcctttttggcgtagtcggaccgcattgcgtcagttggtaagctatttgggcccttatctctgaattgaaagcaagtaatcccagcttgtaaagcctggtcaagtataggtaaaaagttttctcgaccagtatcttgtgtaccagccactaaataagtttggagtatttcctgggcaatattagtcatgttcaacctcctgataagcccaatgatttgtggggccgtgaccgtggccgactgcaattggattggcaatggccgcttgaatgaaggctttactaatctgaatggcttttttgagtgggacttgtttagctagctcggcggttagacaagccgagaaggtgtcaccagtgccgtgggtgcgaacggtcgcaatccgtggtgtgtttaaccagtcgtcactaccatcagcgtagagaacgtaatcacaggcttggtcactattatcgagatggccacctttaatgatgatatttttagcacccattttttgcagttgcgttgcggcgattttaaaatcggcagttgtttgaattttttgaccggttaacacctctgcttctggtaggttaggtgttaagacagttgccaaaggtaagagttctgatcgtaaggtgtcaatggcggagtcggctagtagagaggcaccaccttttgcaatcataaccggatcgagtgttaaggggccaaagtcgaagcgccggaggttttgggcaacgacggcgacgtgctcagcatcggcgagcatgcctgttttacaggctcggatcttaaaatcggctgcgagcgattcaaactgtttggtgactagttcgagcggtagcgggaagctatcttgaacgccaatggtattttgggccgtaattgcgacgaccacgttggtggcaaagacgtggcgttcttggatggttttaatgtcggcttgcataccagcaccgccaccactatctgaaccggcgattgttaaggcttgtgggaaattattcatgagttaagacctccgtgacttgtgcatggttttgaatctcagttgctgtaatgttaaataaacggtctaataattgcggataaaaagaaccaggtaaaggcgttggcattgcttcggcgactaattgcccggcaacggcaaaggtcgttgctgcgtcgatggccgcttgataaggattgtcaggactaacggcgacaaatgcggcgcaaagaccagttagcatatcgccagagccgacgtggacttggaaaagtggcgtgccattggcaactttagtcgtgtgatgaccatcagtgatgatatcggttggacctgaaagtaaaatggttgtttgctgttttttagcagctgtttgagcaatttttacgagatcaatttcgccattgcctgcatcaataccattagcttgccagtctaaaccagctagataagcaatttcccccgcatttccgcggataatttggggtgctcccaatgctaagagttcatcgataattttctgacgataatgaattgaaccgactgcgaccggatcgatgacgactggtttagcttggcgataagcttcagccattaaagtcttcatttggtgaatgggttcagcggatagtgtcccaatattgatgctgagtgcctgcgcaatagcgaccatttctggggcctcttcaggatcactagacatgattggagatgcaccgattatattttgaacattggcgacttgatcgaccgtgacgctgttggcaacgttggtgataatcgggttagcttgttttatctggtctaacagtgtctttgacatgcaaaaaacctcccttaaaatcaaaaaaaccacttttggatgcacgaatgcatagaaaagtggtgttggtttaatagagaaaggcactttcctacgcaagtctgaacttacaggttcaaaggaatcaggttgtacaaacctatctcagttcttctaagaacacccctagtgcaaagcgattaaattgtaccttcagtatacgtcaaatcattatttttgcaaccgttttaattttagggtaataattaataccattatacggtatagaccaaaatatttttgaattaagaaaccgctttatcccttactcttaaaggtctataccaaatattaagcgcttgcttatcgtttgtattaatgatttaacattgttaacgaaataaatgaatggagaacaccttatgaagaattacttacaacgaatgggtcgttcattaatgttgcctgttgctgtattaccagcagccgcaattttgatggggattgctaactgggttggcaatggcgattcaaatgcaaacgtctttacaattttcctagcagctggtggcggcgcaattttaaacaacttgccattattatttgccgttggtctagccctcgggatgtctaaggatcaggatggggcagccgcacttgctggtttagtcgctttcttagtccctaagaccattttagcacctgcctcaattcaagcgatgcaaggtttatcagatatcgctaaggtgaatccagcctttggtaaaatcgaaggtaatgttttaatcgggattatcgccggtttaattgcagctgcaatgtacaatcgtttccacaacgtgaagttgccaatggcgctttccttctttagtgggaaacgtttggtgccaattatggccgcaacagcaatgatggttgtttcagcaatcttgtactttgtttggccagctgtctttactgttttagtatcatttggtgaagcaatttcaaaactaggctgggttggtgccggtttatacggtttcttcaaccgtttattgattccaactggtttacatcacgccttgaactcagtgttctggtttgatgttgctaacattaacgatatcggtaacttcttgggcggtgcgaaatcacttgctaacggaacagccgtgattggtaagacagggatgtaccaagctggtttcttcccagtcatgatgtttgggttacctgctggggcctacgcaatttacaagaacgctcgcccagaacgtcgtaaagcaacagcttcattgatgttagctgctggttttgcgtcattctttacaggtgtgacagaaccacttgaattctcattcatgtttgtcgcatggccactttatgtcttgcatgcagctttcacagggatttcattagccgtcgctgctttcttccactggacagccggtttcgcatttagtgctggtttagtcgattatgttttaagtttgaaaaatccagttgccaaccattgatgttattggttgaaggcttagtcatggcagttatttactacttcggtttcaactttgccatcaagaaattcaacttgatgacaccgggtcgcgaagcagatgatgctgttgatgaagatactgccggtgtcgaaacagatgctactgatgacaaattcatgattcaagcaaaacggatctacgctgcaatcggtggtaaagacaatatcaaagtaatcgataactgtacgactcgtttgcgtctacaattagaagatacagccaacgttaaccaacctgctatcaaggccgctggtgccgctgggattaacgtcttagacaaaaccaatattcaaattattatcgggacagaagtccaatttgtggcggatgccttgaaagaactttataaccacaacacaccaatcgcaaccagcgcaccagaaccagctgctgcaccagttgaagcccctgttgatagtgatattaactcaggtgagacagatgtcttttacgcagttgcaaacggtgaattgattgatattgaaaatgttgatgatccaacttttgcacaaaagatgttaggtgacggctacgcagtcgtaccaactgatggcaagattgtcgcaccagttgatgggacaatcatgacgattttcccaacgaaacatgcgattggcattaagacgactaatggtttggaagtcttagtccacatgggaattgatacggttgaattaaacggtgcaccttttgaagtcgctgttgaagaaggccaaacaatcaagcatggtgacttactggcaaccgttgatcttgatcaaatcgttgcagctggtaagcaaacagcgatgatggtgattattacaaacatgccagcagttgcttacatgaagttcaataatatgggccaatcagtccaagctgatacagttgccgtaaaagcaaccactaaataaacaatcaaaaaacgcctgacgaattaagttcgtcaggcgtttttgtgtggtataaatcattatccaaataggtttttaaagaagttgccaatactatcgaataatttttgaatgaagttacggttactttcagtgtttaatttgtcgaagacattcttagcattactttgaatgttatccattaatttaccggcttggttcttaaaatcatctgatttaagcgcaccagaatcttgaattttaacgagtaagttaatgatttgtgtcttttggttattgttgatgattgttgtaaggttattttgttctaattgattattaacgatgttggtaatttggttaacggttaggttatcacccttgttagccatgtcttttttagcacctgttacggcgttgttaagttgtgaatcagtatagccgtcagtgcctttgttagcttgggtaatatcactgagggtgctcatttcgtcttgagcggcggtaacttgtgattgatttaaggtttcaccattttccgcgaaagcggcgtaaacgccggcgagcgcaccagaaccgtcaattggtacggcagaagtaacgtagatcgtcgcgtttgtgacgccggcggttaacgctgcgtttttatattggttcgcggtaattgttgtgatattgttgctgccgttaaaatcgacaatcttaacgttaatcccggtattgctattatttttttgaatcaacgcactagaataaacgttggaatccgcgttaaaagtttgttgattttgatcgagatatttaacgagggttgaaccggtgaccgttaattcatcagaatcggtgatgttagcggcgttttgaagcgttgagagggtttctgatttttgcgtacttaaaaggcttgttccgagtgttgcgactggtttatcccaagcattactgtcggcaaaaacgctgtgggcgctgagacctaaaatagccgtcatgacgattgggagaatgtatttgagtttattaaacataatcgtaaatcctttctcagatataagatactttcattatagctaatttaacagggaaagtatcttaatttgctagacctttagaattaagcggtgtttttaattattttttaagggatgatctgcttgtggttgaaccaaactcatttcttgggttttcgttaacttctcataaaagagttggggctttttgaaaagccacgataataggaagttacccgtaaataagacgggtggtaaggcagccagaccacccagtagaaggtagatatctaaatgcgtttggccgctagcaaccaaggcatcgatggtgatccgccataattggaaactaggtaggatgataaagaacagtaaaaattggcgactgaatatccgccaagcaacggcattttcggcggtgatttttaacctcaagagcgatttaccaggtgtctgtccccgccagaggacgggcagtaagacgaagtagagtccgttttctaaacaatagtagaaaacatcattaccaaaagttggtagttttaataaacgccaaatcgctgtaacaatcatgccaatcagtgttaagagacagtaatcgattcccagtgctaataagcgacggagataaccaactttttggccgttgatgtaagccgcttgatcaagtgcatcacgagtcggcaagaaataggttaataagggtgctaagccaaagccgatgagtccgccactcgtgtttagcagtagatcatcaacatcgaataaccgatatggtcgggggtaaatgccatagagtcctgacagctgggttaattcgaagaataatgtgaggccaaaacttaataatagggtctgtttgaatgatgtccggaagaagtaacgaaggtaaacaccaaatggaatggttaaaacgatattaaagagtggttgaatcgtcgccgcttgttttagggttgcaagataggttgccggttgattccaaacccagtgtgtcgtgttaataaattcgcggacaaaggtgaacggcactaggttataacgcggggtcgtcaaatgagcgacgactgattttggtggtaaggggagtataatgagacagtaggcggctaataagtagaagataaagctataaatcactaagcttcgccaaaaggttagtgcgccagaacgccggtaatgatagattaaaaccggaattgtgagggcgattgcgacaaacggaaaaatcgtcgctgcggtgatgatattatcgagatatagcattaggcaactccttgaaagattaagatggtttaattgtagagggcaagttggtggatgtcaaaaccgtaattattgttcgtgtttaaagcgctgtattaacgttgtgtaatcatcattaggatttaaaacgttaatcaggtagtgtttattaataaagttcgtgttttcggttgatttcaaatagctgagttggtacaatagcttttgtgagtttagtacttaaatatcaggttaagacaattaacttgaataaaggggtttattcatatgacatctgcagtagtagttggaacacaatggggcgacgaaggtaaggggaaaatcaccgactttttaggtcagaatgctgacgcaatcgctcgttatcaaggtggagacaatgcaggccacaccatcaaattaggcgaagatacttatcatttacaattaattccatctgggatttttaacagtgacaaggtcagcgtcatcggtaacggggttgtggttaatcctaaatcactcgttggcgaattacgtggtttagctgacaagaatgtagatacaagtcaattgaaattatcagatcgggcccacgtcatcttgccttatcacattaagctagatagcttacaagaggccgctaagggtgatcaaaagattggaacgactaatcgtgggatcggcccagcttatatggataaagcagctagaagtggtattcgtgtggctgatctattagataaagatttatttgcaactaaattaaaacaaaacttagctgaaaaaaatgccttatttacaaagatttatgaagttgaagctctagatttcgactcaattttcgaagaatactaccaatatggtcaagaattaaaacaatacgtttgtgatacatctgttgttttaaatgatgttttagatcaaaagggcaacgtcttattcgaaggggcccaaggtattttattggatatcgaccaagggacttacccatttgtaacttcttcaaatcctgccggtggcgtttcaactggttcaggggtcggcgcttcacggattgatgaagtggtcggggttgctaaagcctatacatcacgtgttggtgatggcccattcccaactgaattattcgatgaaacgggtgatttcattcgtcaagcaggtcacgaatacggcactgttacaggacgtccacgtcgaattggttggtttgatacagttgtgcttcgtcattctaaacgggtggctggcttaacgcaactttgtttaaactgtgttgatgttttaactggtttgaagacgttgaaaatctgtgtcgcttacgaattagacggtgaacgcatcgatcgttacccagcaagcttgagcgaattagcacgttgtacaccaatctatgaagaattacctggttgggatgaagatattactggcgttaagacacttgaagaattaccagtcaacgcgcgtcggtatgttgaacgcttgcaagaattggttgatttaccattagccacatttgcagttggtcccgatcgtgatcaaaccaacattttaaaagcaatctggtaagcacagcctaaaaaagggtacaaaaaaagagaatgcaaagttcgttttcgaaacgcgtcgttaaacgcgccaacaaactttcattctcatgggtttggcaccagtcagtattatacacacattaccactaaaaagatagtgggaaaattagttgttttagaggagttattatgggaaaagtaagtcggttcttcggtatcgaagaacaacattcaacggtccaacgggaaattctagccggattcaccacgtttatttcaatggtttacattttatttgttaatccaagcgttttgggtgcttcagggatggataaaggggccgttttcgcggcaacagccttagccagtgccattgggtgtttcttgatgggcttgtacgctaaatatccaatcgcaacagcccccgcacttgggattaacgcgttttttagttattcagtagtcattgggatgggtgtttcatggcaaacggcgctcgcaggtgtgtttgtcgcttcattgattttcatggtaatcactatttttaaattacgtgaaatcattattgatgcgattccgcgcgatcttaaattagcaatttcggccgggattgggatgtttgtggcttttatcggcttacatggtggtggtttaatcgtcgccaataaatcaacagtcgtgggtcttggggacttctcacaaggcacgacttggttaacagtttttggcttgattattacaattattttaatggttaaaaaagtaccaggtgcgatttttatcggaatggtcttaacttctattttaggggccgtaacgggtttaattaagttaccaacccattttgttgctgctgcacctagtttaaaaccaaccttcttagctggtttgaatcatgttggggatattaatacggttcaaatgtgggtggttgtcttgacgttcttattagtgacgttcttcgatacagctggcaccttggttggattagccgaacaagctggtttcatgaaggacaacaagatgccacgtgttgggaaagccttgatgtcagattcttcagcaatgttggctggttcactcttggggacatcacctgttggggccttcgttgaatcatcagccgggattgccgttggtggtcggactggtttaacagcagtggttaccgggattttattcgtcttcagtttattcttctcaccacttttaacggttgtgacgtcacaagtaacggcgcccgctttagtaattgttggggtgctaatggcgcaatcattgaagaaaattgactgggaaaaattggaaatcgcgattccagctttcttaatcgttttggggatgcctttaacttacagtatttcagatgggattgctttagggtttatcgtttacccaatcacgatgattacggctggtcgtcgtaaggaaattcatccaattatgtacgtgctctttttcgtattcgtaatctttatgtatattctaaacgtcggttaatacgacttagcggttagtcctgtggatcagccgcttttttgtttcttaatttttggataaaggcgcggcgtttaaattgtttatttggtgtgaatcgcttaaattaaagaggaggtgagtgacatgaaaattcaaatcctatttttgaaattagtttgtggcttagccagcttaccgctaatctttatcgggttgattgggccacggttaacgcataaaattgcgcagaacttcccccaaattccgggtggcttgtggttggtcgttctcttggtttatgggtcattgatcctggcactttgggggttgtaccaactccaacgaattttacgcgaggtcgatctagtcggtcattttggacagaagacacaacaagccctccgccaaattcaaaaagtcgccagtatcaatggcgcggcctacctcttgagcttaccgttattctatttaattgcagtcagacaagcgacaccgggtgtcatgttgattggcctagggttagttgttatctcactggcaattgcgattaccgctaatttatttcgaaatttaatgcatccggcaattattgtggaaaaataagactttttaaaatgagtaaccgctttgagatgtgatacaataaaataaatcagtagtaaaggggataaattgttgtgcaaaaaaagacgaagaatcggcttattaatagtctgctagcacttttattgctcattggtttaatacttgtttttattggcccaattcgcaatcaaatggttaaatcaatggctaatcgccggatgaatacggtgacggccgctcaaattaagaaaaacgaacataaaaaggctaattttgatttcaatagtgttaaaacactcgatacaaagcaaatcgtcagcgccgccgttaagggcgatgtgattgttttagggaaggttgcggttccgagcgtcggaattgcattgccggtcatgaagggcgtctcagaagcaacaatggcccaaggcggtggtacgatgaaacctgaccagaagatgggtgccgataataactacgccttagcaggtcattcatttaccaacatctttttaccattggaaaatgttaaagttggtgacatggtctacctaactgatttacaaaacgtctattcataccgcgtaaacgttaaaaaatcgattgcccctgaagaagtcaaagtaatcgatgatgtcccaggacataaaatggtcaccttaattacctgtgatcaaacggttcgtcgttggtgcgtccaaggcgaattagtgaagactgaaaaagcgaataaaaccaacttaaaagtatttggctaattaaaaaacaaagaccccagtgtggtaaataccgcaactggggtctttttgtgtatcactgatgcgggaatttagaagtcataattattgaaaataattcttttatttcgttggttaataattgatattccgaactattaaatgaagatttcaaaattcttaataataattgtgcgaaatttaatatagaccgtgttttttgttagcgatattaaatggaacgattgataatagacacttttaatgattattaatattttaataagcttaacaggtgttaacttatatcgattgaagcttaagcggataactttaacgagggatgttgcatgtgataacttatagatataataaagtagataaacttaaaggagcatgcacaattgaacttaggaagggcgttcttatagttattaaacggaatgtttacaaaacggaaatataagccttgctaatcatcgcgtatcttttaaaataagtttgtgcatcaaattttaggaggtaacactattatgaaatacggctatgcgagagtgtctacgatgggccagaatttagatacacaaatcgagcaattaaaacaagctgattgtgataagatttattccgaaaaacttacggggacgacaactgaccgtcctaaatttaagttgcttctaaaaaagctaaaaccgggggataccttagtggtgaccaagctggatcggtttgcccgtaatacaatcggtgctttaagtattacgaaggaattatttgcccgtaatatcaaagtgactattttaaatatggggactattgaagatacccccacagggaatttaatgttgacgatgttgagtgcctttgcacaatttgaacgcgatatgattgtgacacggacacaagaaggtaaggaagctgcccggatgaataatccgctctatcatgaaggtcggcggcaaaaatatacagatcaacaaattgaaggcgcattgaaggatgttgaaaaaggattaacaattcaggaaattagtttaaaaacaggaatcagtatttcgacgctaagacgtcgtgccgtaaaggcctaacacaaaagcccgcttatcttttcagataggcaggctttacttggcagataacttttatttttttataaaaaaacagtcataatgatgcaattgcatcattatgactgtttatcgtgtatacttgatgggtggtcaggggtttcagcctgttccacgtgaaaatgccagtataccagtagttatgggtgttttattacatagtttttatgatgtgaatacgtctttgaatacggtttgttagaaattcaagaattgggccagcttttgaacggcctctttattttggctattagtaacatgcgtatagatgtttaaggtcgtttgagcgtcctcggggcctaatcgttcttgtacttctttgatggatgcgccagcagagaatagggcggatgcgtgagtgtgtctaaaaccatgaacggttatctttggtaggttagtgccatctgttagccgtctaagccatttagagggcgtatttaatgatttaaaagtattcttagttgttgcaaagattagttggctaggttgggatgtgttaaagcctagcatgaaatatatccgcttttgatccatctgccatttacgtaaatagaatagggtttgtttatcaagtgagattagtcggttacctttcttggtcttagtcgcttggataatctgtttaccgccagcaccttgagttaacgttttgttaatgcttaaggtgcctttttgtgtgtctaagtcatcccaagttagggctaagcactcgccacgcctaacacccgtaaaggctaatactcgaaataacgtgtattgctctaagtgttcgttgggatccatgagtgcaaagaattgtttgagttggttcttatcccaaaagttttcttgtttgtcgccccaagtagccgcctttttaggcatcgtaactttagtagcagggttatcagtgatataaccgcgcttaatggcataatcaaatatggcttggacataattgaaccagcgcttatagttgcgtgaggtggctttaaaccacttatttaaggcttgttggcattgtgccactgtgatcgttctgattctatatttccctaaagctggtaaaatatgattgttaaacatccctgcggtacggttccaagtgctttcacgtaccgtgttaatatatgagctgtaccattgcttataaacgtcctcgaacgtcaagttaatgggttgctggtctaattgaccactgtccgcttgtaattcaagcgttgataatgctaagcgcgcctcttttcgggttttgaagccccgtctagtggtgcgtttttctttacctgtttgtgggttgatgcctaagtaggcttggaacatgtagaattcttggccgttcttttcatattttttaatcgttgccatgttgacagtcctttcatacgcacggggcagtgtggtacgtaaaaggatgctaaaggctaatgttattgttcatctgccatgatttgcttaatttgcttatcaaagtcagagtttattttttgcgttttattaaactgatcgtattcaagggatgccttggctttagcattagttgttgaaacggatccgttattaggcagtatcttgtattcttggaattctaagaagcgatcaatgctattggcaaattcttgcatggtaaaggtgttacggcgctctattaaaccctcgatataatcaaagtaacttgatacagtccgttcaagctgccttatttctttttgatctaagtagttcttagccacttgggtatctgatttcaatattctaccatctggagagtttttccaagttgttaaccccatgttaggttggttgtgatcagcatggctattaatgatttcggcacccgtttggccagtgatggcgtaatggaatttattttgaaccgtagcatagaagtttctagtaactgggctatctttatcataattcgtgctgatttcttggaatatatcagttattttaagccatatacgccgttcacttgcacgaatggagcgaacgcgttctagtaactcgttgaagtaatctttatccagcaagttagaaccttgttttaagcggtcatcatcaagtacaaacccttttatcatgtattctttaagcgtttgagtagcccactggcggaagtgtgtcgcctgaacggagttgacacggtaaccaactgaaatgatggcgtcaaggttataaatagttaattcacgcgtaacgttacgggcgccttcagtttgaactgtttcaatttttgcaacagttgccgtttcgtctaattcattggtttcaaaaatgttttttagatgccgcgaaatagatgacttatcaacgccaaataattcagccatagccttttgagtagtccataacgtttcattactgataataacgtcaatactaatattgctattctctgttttatagagtaagaatttggtttcgttatcggtcatttttgggtgtccctccttagaaattttgaatatctgcgaaatagatatagtcatgtgggatagttaaaataataaacgctttttttacttgttatcatcagagccaaataaatctacgaggtgagtattactactaaattttggactttcattggattcatgtagttcaactaatacttcgcaaacaacgtcgtaagtccaagatttatttagtgaagtttgcacgaatttttgtatatctttttttatatcggattcaaaagctactgatatatcttttatataagtatttaattttgatagttcctgttcgtttgtaggtcttaagccaatcccgacgcgatttttattattaggatctattccgtaatcttctgtatacccgctaagttcgatagtattaatcctaatattattttcaaggatattaataattagagtagattcaaaagtaggaatagggtctcttctttcggacaaagcctcaggatctgtgatattcgggccaatatcaaagaagaaattaaagtcaaaaggaatgtattcaaagaaagaagagggtgtaatatttagcgcttggcagattttattaatcgtttcaacttgaaccattttagaactgtttgttgaaagagctgttaaagtcgttctagaaattccggtatcgtttgataacttactgatacgaatttgccgttcacttaataataccgctagattatttcttaacataaaaattcctccaatttactgtaattgtacaagaagctgaactaatattcaatttaaatataatattgactaattcaaaggtatgtaatatgattattatgtacaagaaactgaacaaaagagttgataatagaacgttttttgaaaaggagtttttatggataataatctttctatgattatcggaggtcgcttacttaacctatcaactattagccgggatactggcattagtcggacaacgttagctagtatttactataaacggtccaaaaccgttaaattagatactttaactaagctatgtgattacttacaagtaccattacatgagttaattgattatcaacccaaggagggctaagggatgccattagaagtaacgctaagccagcaggcagacaccgagcttagaaagcaagtttacagcattataacggaagctatcgaaatggcgcgccgtgatagtgacttagataagccgtttctaaaaaagggtgctactgctaaatggttagaggttgaccctaagacaattactaagatggtcgctgagggtttaccatgccactatacggcaggtgttcagttatttagtaagcaagaagtaaaacaatttatcttggatcatggattataaaaagcacggggcagtgtggacgttctacttagcttatgacaataaaaaaagcatctctacgagctgggatgcagaaaggtggtcaatattatggcaatcctaccaacgtggttagatgcgattatatggatgtttgcaggtgcgggcatttatggcattactagtaatttaaaaaaatactttgattttgaataggtgatacatatgaaaatgggtacaaaaaaactcactagctaaactttggacggtttctagtgagcgatatagcttagacaatggctatttttgtaccctttcattttatcaaactttgaattataagcaataaaatttgaattatgaagggatttttaattatggataagacagatgtagcatgcaaattaacggcaattagtagcagattggcactaattggtaactttcttgaaacgatacagcacgatcatacgacaaaagaggattgggcagtaatatatacgctgtttaatcgagatggattagagaatttggccaattcacttgatgatattagagagcaggtgcaaatcttatccgataacctaattgaaatggatgaggtggaaagtcatgccagttctgctaaatgatgcaatgagctatgctaagcgtggtttacaggtctttccgttaacgcctaacagcaaaataccgctaaaaggtactcaaggcagtaaggaagctaccagcacccctgaacaagtaaagacgtggtggactaataaccctgattgtaatattggcgtggccacccgcggttttattgtactggatattgatattaaccatgtggatgatgcagacggctaccatagtttagaagtgctggaggatacctataataagctacccgaaacgctaacggttaaaacggctagtggtggcagacacctatattttaagctaccagagggcgtagaattgccccagaaaattgcattcttaaacggtgttgatattaaggctaaccctaataattatgtactgctaccaccaagccgaataaacggggatgcttacacgttcgaaaataaacggccaatggcagacctacccgagtggctaacaggctttattttaaaacgaaacaaaataaaaaggacatcccgagcgttcagcgctaataagcgatatagaagccacgtgaccgagctaatagaaacgttgacactaggttttgaaactggccgtagaaacgatacggctgcaaaaataacgggtcaattactagcgtatggcgtagacgttagacttgcttggcagctggttcaatacgctaatggcaattctagcgagccattactacaaaatgaactagaaagaacgttcgagagtatcgcaagaagggagctgggggcaacgtgcaattagatcagttagtagcgttacaagagcaagaagtcaccaagccgactacaatggctggtttaaccagtagattacagagattaggcgaacaatggcgcgttgatcgtacaaaagttaacgaaaaaacaggtgaagtgaaagcgcctagagttaccccctagagctgtggcggacatcctagaaaaggagtgtcactttaccaatataggtgatgcaaataaacagcaacttttcatatataacatggcagaaggtttatatatgaaagataagcagttaattaatcggttgattttatctgtggaaagaaatttgaatatgcgccaatgccgtgacgtttatttctatttagaaacggactccaaaaggtctaacctaagtgatcgtaaagaattaattattgttaataatggcgtgtttaacaaaaatacgaaggaacttgaaccattcacgcctgatcacgtctttatttcaaaaattagtacaaattataaccctaatgccaaagggctcctatgatggaattacggacaaactgttcgatataatacatcataaaggagctttttattatggcaattaaatattcaaatgaatttaaagaatcgattgttagcttaagtcagactggccgttcggccaactcactggctaaagaatacaacgtcagtgtttcaacggtcactaagtggattaaacaagctgatcctaacaacactaaagtgctatcatcaaatgaacgtgctctgattaaagaaaataaacggttaaaagaagaacttgatattttaaaacgagcggcggtgctcatggcaaaaagctaattattaaagggcgtgccctcgtgttagaagtcgtcaacgctaatttacttgctgggcaccgcattacgcgtatcttatcagtactcaaaattccgcgctcaacctactatgattatctacattggcagccaagtagaactgaacgccgccggcatttaattaagcaagaagtgttaacggcttggttaagatatccaatgtatggctacccacgattaacgatcttactaaatcaacagtctgatattcacgttagtcagcgtctggtctatcaacaaatgtgtgaattagggattagatctagaatggttaaacgaatcaataagccaaccactcagactgattatgatcagcgaccaaacttgattaagcagttaactgatcaatctggtattttattgactgatattacgtacattccccttaaccatacttggtgttacctagctagtgtctataatccagtaacccgacgggttattgcttaccaacttaatacgcagatgactaaagaactagcgactaacgttattacccaagtcatggcgcaagcagttaaaccacaaattattcatagtgatatgggaagccaatacacaagtgacttatttgaaaacactttatcgaagtatggtatcaagcattcttactcccgaaagggtcagcccggcgataacgcgcgaattgaaagttttcattcaattttgaaacgtgaatacgttaatttccaagattttaagacaattcatgaagcaatcgccggaattgataactatattcgttggtataacagtgatcgtatttcacttgtagcgtagctacaggctattaaattcaataatgttggggcttatttaatatactctaaagcgtttttaaaatctgaacggggctaaaacttcggcctccgaaaattaaattaagtaatttaaattgaaagtcaaatttgttcgtacttttatgtccggattcttgacataggagccgccatgtgttacttagacggtagtcataaaacaaggcaatatatagcggatacgatggggtatagcaggtctagttataatcggtttaagaatagggcgttattagcttttgccgaaagctataataatcaagagttgcttgtttataagtaggttgcgcaaaatttcgcaggctagtttatggattagtaattgaataggacaagccattattggtttatccaatgtaaacctacgtgaattagctttaaacccgtggtagtagcctttggtgttaaatataactagacaaaagtagacaaaatgccctttttttatttctatccgtacaaatcagacaccctaaagagaatagaaaatgttggtttttgttggacataaaacctaacaaaacctaacattaatttaattagagattttagaggccctaaagaaggagtcaccgaattgacgactccttaaagatgagttagtatattgcaacagcatctaatgcactgatatggtgcgtcagatacttagccaattatagaaacagtacagcggaaaattccgctctaattaactttagataccgttgattttgaaaataaaaattttgacaattttaaacgcgtcgctggatagagttgggtcaaagtccccacttaaaattaacgggggttagttagaggagtgctgcgtaacgtacgtcctctttttctcgtcccaaattctatctattttaaacgcatatatggtgagttatacccatttttattcaaaaatgaggtgcttgtggggatgtcaagaaaacaaaagctattatcacagtcaaaaaggaggtaaaatagggcggtttgtcgaaccgtgaaataacctgccataacagatcgttctattaggtcaaaataaaatgagtacagccgaaaattcggccctacttaactttagataccgttgattttaacgagatgctgcccaatccatttttggtttcggctaattgcatggaagcaatctgaggtaccgaaacggtagtttagaaccactctcctgaattagagtggtggtgtatgtgatggattttctatatccgacaacttggcggacatgaaacaagctactataacgtatcgtcctgttgggctaaaaaaggttggtcgaaaattcgacagaccttttccgtgagtaagataagcatatccgcccccctttaaaatgatttgctaatcccttggggagacaaacaacgggaaggggtcaagactccgcagagatgcgttatatacgtgtgagggtggggtagtacggctgaaaattaagccctaattaattttaagtgtttttggatagaaacataatggcgtaacgaaacgttacccctaaatataatctagattaaaaaatacaaccaagccaaaattgggctcgtttgaaacatatccccaaaactggggacatccccttatctaatgaatacagtcgcgatttacgacagaaactaatgctagtagttgctagtatgatccttgacggtctatgtttaatataggccgttgtttaatgaagttagcccaaattaaaagacggccattaatatgaccgcctgcagtaagttatgtatatgccccgtgcgtgatttttgttgaatacgtgaatacggtttgtcgtattcactatgaatactaatctgctaagaagaaataaaaaagccgttatatcaatgcctaagcacctttataacgacttatcatgtatacttgatgggtggtcaggggatcgaaccctggacccacggattaagagtccgttgctctgccagctgagctaaccacccatgtgatttaatgtctcatgccttacgacttaaatatcataccataggaattggcaatctgtaaacagtttttttaatttttttcaataaaattgttgtgggagtaagtagcaacgcatttaaacgcattaaatatcgttaatggcgggtttataacgggcttgaaaacgagaccagattttgaattgcattcttaaaatgagtataatagaagacaaagcatccaaggaggatactaaaatggctaaaaaaatattggtagttgatgatgaaaaacccatctcggatatcgttaagtttaatctaacgaaagagggctatgatgtttacacagcttatgatggggaagaagcactacaacaagtagaagaagttgtccctgacttaattctattagatttgatgttacctaaggttgacggtcttgaagtcgctcgccaggtacgcaaatcacacgatatgccaattattatggtaacagctaaagattcagaaattgataaagtgattgggctagaattaggcgctgatgattatgtcacaaaacctttttccaatcgtgaattggttgcccgtgttaaagcaaatttaagacgccaagggtcaaccagtcaatctgataaagaagcaaatgaggaaaaccacgaaattaacattggcgacctcacgattcacccagaagcttatattgtgtctaaacggggcacgaagattgaattaacgcatcgtgaattcgaattattacattacttagccaaacatattgggcaagtaatgacgcgtgaacatttattacaaacagtttggggttatgactattttggtgatgtgcgcacagtagatgtcacagtccgtcgtttacgtgagaagattgaagataatcctagtcatccagaatggttagtaacgcgtcgtggtgttggttattatttaagaaatcctgagcaggagtaagtttaacgcatgaataaaaaaattcggttattccaatcaatccatttcaagattgcaattgtttttgtcttgttgctgctagtaacactagaggtgattggggcttcgtttgttaagcaattggaataccaaaatgtgaaagattttaagcagtcattgcaagtgactccctatgttcaaaatcaattaagcaatgaattgatgagcaatagcggtaatgcgaataaaaatatcaaggatattattggcgatatgggcaattctgctgagattcaagtcgttgataataaagggaccattcggggtgtcactaatctgaatacgcaaagtactgttggccaaaaaacgcgtaacccacgtgtgaaacaggcgatttattcagggcatacggaacaagaagttgcctatagtgaaagccagggcagttattatacggcgattcaaccgttgacggatcccaacggtgacagcaatactgtcgttggcgcagtctatattcgtgccagcatggaagaagtctataaaggcatttcatcgatcacggttattttcctgacctcgtctcttgtggcaggtttattagggatggctttatcgattgtcatttcccgggcaataacgcgtccaattgatgaaatgaagaaacaagcaattcagatggcacgtggcgattattcaggccaggtccgcatctatggacaggatgaattgggccaacttgcgattgcggttaataacttgtcagttcgggtcgaagaggcgcaagaagcgtccgaatccgagcgacggcgactagacagtgtcatgagccacatgaccgatggggtgattgcgactgatcggcgaggtaacatcacgattattaatgaaaccgggcaggactttctcaatgtgactagcgatggtgtattaggtcaatcgcttctaaaagtgcttaaaattagtgaagaatacacacttcgcgatttattagaaacccaacaagtgatggtcttagatttttcagatcaacaagatcatgacttgattttgcatgtcgatttttcattgattcaaagagaaacaggctatatcaccgggttagtgtgtgtgttacatgatgtaacggaacaacaaaagaatgaacgtgaacaacgcgaattcgtttcaaatgtttctcacgaattgcggacaccattgacgagtgttcggagttacatcgaagcccttaatgatggtgcttggcaagatcctgaagtcgcaccgaactttttgaaggttacgcaagaagaaactgatcgaatgatccgaatgattaacgatttattgagtttatcgcggatggaccaagggacagctaaaatgaatttagaatttgttaatttaaatgaattctttggctatgtacttgatcggtttgatatgatgattaaacgggatcaggaacacgataacaatgcatcaccgagagggacgggcaagttaccaactgatgatcctaataaaaaatacagtattacgcgcgacttcaccaagcgggatttatgggtcgaaattgataccgataaattcatgcaggtagtcgataatattatgaataatgcgattaagtattcaccagatggtggggtcatcacttgtcgtttattggaaacccatcgtcatgtgatcttaagcatttctgatcagggcttagggattccacgtaaagatttagggaaaatcttcgatcgtttctaccgggttgataaggcgcgctctcggaaacaaggcgggaccggtttaggcttggcaatttcaaaagaagttatcgaagcacataatgggcgtgtttgggttgatagccaagaaggcaaaggctcaacattctatatttctttaccatatgaaccaattgattctgatggaggtgattgggatgaaatttaatagttttgtgatgcgagtcatcctgattacttcaatcgttttaagcattattttatcttggaaaatctggacgaataatacgcactatgaacggcgcacagacagtcaaacaacgactaaaacggtcagccgtaagtcagatcgcaaaattagcgatatcttcttacccacgcaaatcctgtggcggaccaatcaacagagtcagcttgtttataattcaaaggaaagcttagtgcccaagttgaaggaagccatgaagttggctaaatcagcacggtttaaagcgtctaagttaagtgaagccaattattatcaggcgattacaaccgatgatacattgactttattgtatccggacaatatttcgtatgcggtctttaagaaggtttttgacgacagtaataatcaattgagccggaatacgacctttaatcgaatcaagattacgatggggactaagccgcagttgacgttgatgaacgataagagtcacatgatctatcaaacgacgatgcgtcaattttcagtcgcgcaggtcaaacgaatcttggatcattcagatgtgcatttaaacgttaaagagagtctgttaaatcataaaccgtttatttatgtggccgccaatcagtcacttttaccgtacagttatttagtgaaccaacaacctgaaaattactacattacaactttgttggatcaaaagaatacggataacattgacgctaaggaacaaggggacaacgtaatctatacagatggtgacaataacgatttatacaagcgactaaccattaatcataaaacaggtgaaattgcgtatgtgaagtatgaggataccaagtcgccaacaggtttaacgaagagttttgaaacgagttttgaagcattattgaagaccggcaattcactatccgggatgcgtttttatagttacgatgaagataccaattcgacgacctaccggacctatgttgaaggcttcccagtcttttaccaaaccaattttgggagtgttaaggtacagttattgccaactggtcaacgggttgatttctcaaactatagtttacaagtgcccgtaccagcaggtgataaaccagtcactttaccaagtacacaagccgtcttaaatcagatgactaaaaatggtttattactagagaatatcgataatattcaagttgggtatgagtggacgcaagaaacaagtaatgaccaagtaattgatcttaatccaacttattttattcagtacaagggtgtttggcgtagccttagcgcattattagcacagaaagaagaactaaccgaagggagttagacagatggattttcgcagaattgaaatgatttttatcgccatttttattgcgctcgatatctatttgtttatgtcgcttagtggtagtcaaacgaccaattcggcttctattacgaatcgttcgcaaaccagtcagattttaaaagatttaaaggatgatcagattaccgttaatcggttatcgaatcaaaaacgagaaagttattatttagccagtcgacaagctgatcagacgggcttggaagctgctagcgccaagttaaccgggcagacggcgtcgtttgataaatctagactaaccctgacaagcgtactcgacaaaccgttgagctataaaaaggggcgggcatcttcggctatcaatgctttcttgaaagatggcaataatgtttaccaggctgatcagtaccggtattcaaaagcattatcaagtaatcaacaagctgtttacgttcaaaaggtgccgggcggacaaatgatggacgaacacgggcagttaatttttacattggataacgggcaaatcagtcagtatacgcaaacttacatcaataaggtgcaaattttacgtgaaaaagaaatgaccaaaatttctgcgcaaggggcagttgtcgatttatacactgacaacgaaattccgaataattccaagattttgtgggttcaattaggctatagcgccttattagatgccaatagcagtacggtttatgtaccagcctggcaaatcgccattgaaaataagagtaccaaaaacgtcgtcgttaagcgcatcaatgcgttcaccggcaccttaataaagaatcgcagcgaagtaacatcataagaatcagtgaaaaagccaaggggatagcggataaatggtagaaaaagatgaaatgcgggttagcgtcttagccagcagtagttcaggcaacacaacttttattgaaacaccaactcaaaaaatattagtcgatgcggggatgagtggcaaacgggttcaggatttaatgcatagcattggtcgggatttaaaagaggttgatagtctactagtgacgcacgaacatcgcgatcacagtagcggtgttggcgtcttagcccgccgttacgggattgatgtgtacgccaatcaaccgacttgggatgcgatggcgtcaattattggcaccgtccctgatgaacataagcacgtctttgagatgggcaaaaccaaaacactcggcgatatcgatgttgaaagttatggtgtgtcacacgatgccgctgcggcgcaattctatcaatttcatcataacaaccgggccttcgcaatcttaacggatacggggtacgtttcggatcaaatcagaggcactatcgaaaatgcggatgcctacttggtggaatgtaatcacgatttggaaatgttacggatgggaaaatatccgtggtcgcttaaacaacggatccttagtgatactggacatctgtctaacgaagatggcgcttcagccttaatggcttttatggggcaacaaacaaaacgcgttttcctaggccatttgagccaagaaaacaatatgaaggagttggcacacttaacggtggcgtcaattttagaacaacatgattatggtgttggcacggactttgaaattttagatacagatccagcgattgcggaccctttatttgttgtttagggataaaagcgttaaaataccgctataaaaacaatttaaaattcgtaacttgttcatgaatttttcaaatttaaattttatgatagagataatcaataaacagaataaaattagaaagtttgggtgatttagtatgaatcaaaattcaggattaatgaaaacagcgattgttgtggttatttcagcgttgattggtggtggcgcagcctatgccggtttttctcgactcggcaattcggccaatgacgtcacgactgcaacgcagacgcctactaaagcgggggcaactaagattagtaacatcaaagtgaactcatcatcacaaacgacaaccgccttccaaaaggttaatacatcagttgtatccgttgtgaacttacaaaaacaacaacaatcaaccggtgacctgagttcattatttggttcagggagcactgacagcaatagcagttcttctaagagcagtagcagtgatttagaagaatccagtgaaggttcaggtttaatctacgagaaaaaagacggcaaagcttacatcgtgacgaataatcacgtggttgctggttctgataaaatcgaagtcattttgagtgatggcacaaaattggaagctagtttagttgggacagatgctgtttctgatttggctgtcttaaaaattaacgggactaaagtgaagaagacggcaacgtttggtgattcagatagtatcaaagctggtgaatcagttcttgcgatcggctcaccattgggctcagaatacgcaacttctgtcacacaagggattatttctgctaagaaacggaccattgatgtgacagacgaaacaaccggccaaacaactggtcaagcaactgttattcaaactgatacagcgattaaccctgggaattcaggtggcccattagtcaacatggctggtcaagtcattgggattaattcaatgaaattagcttcaaatggtgaaacgtctgttgaagggatgggctttgctattccaagtaacgaagtcgttaaaattattaaccaattggtggctaacgggaaagtggttagaccagcacttgggattagtgtgattgatttaaccaatatttcatcaacacaacaatcttcagtactaaaattaccatcatccgttaacagcggggtagtagtggcctcagtaacaagcaattcagttgctaagaaggctggtatcagtaagtatgatgtgattgtcggcttaggcggcaagacggtttcaagtgtggcagacttacacacaattctatatagttacgcaatgaacagcacaactgaaattcagtactatcataatggcagcttgaaaaaagcgaatgttaaactcacacaagcagcttcatcagatagtacgacaacaactaaacaaacgaactaaaaataaagacgcgcgacctgcactaggccctgtcaagttgacaaatgaaataatataaagttgaatctgtctctatgcggcttcactccagtattcatctggggtgaggccgtttctttgtgctgagcggttgtggtgattgaaatattcgattccttcctcaaccagtcttacaagctcttcgcaagtctttgctagtggatggcgagccatccaccgtaacttgaattcgttccaccagcgctccatcggtgcgttgtcgtatggtgttcctggtcgagacatgctacgtgtgacgttgtaacgaccaagaaagttgttgaaggcaccagaggtgtaggctgatcctcgatcagtgtgaaccaatgggtggacgtcgccagaagcctcaaaggctcgttggaaaacctcgatttctgctgctgacgtttcagtagtgctcaaattgtaggacaacaaacgtcggccgtagagatcaaggacgccactcaagcgcaccttatacttattatttacgccgtaagtcagttccgttgaatcggacaaccagacctgattaggactgtcgacgtcgaagttctgattgagcacattgtcttgaatgtgctgttcgttctccttatgtcgactgtgcttcttgacccgaatttgacatgtcaagctgagctcccgcatcacacgacgtaccatcctgaaagtaacggggaagtcaattaggtcatcatgttgaagattcaataaaaggttcccagcaccgataccttgatgatgaaaatcaaaccagtattgtgtccgttccttgagctgacgattacgggcttcccaagctgtttcttctcgatttaaccctttgtagtaagcctgccggcttacaccgacaacggccaacagcgtagatattgcaccacgcttgccttgactgacctcattaattgcgaagtaagacagtcgatgttgtttactcaccccctgcgctggatttccagcaatttttttgcgaatgcctccacaagctctttgtctgcgagctgtgctttgagctgcctgatttcaagattggctttatcgagttcagtcagctcagcttgttctttgtgatggccacggttgtccacgagcgcctcatagccgccgtgattggccttgatcacccatgaacgtgcttgttgataagagacttggaagcgttcagcggcctctgtgtatgaatgattcagcttggtgacatactcgacaatttcaatgcgttcttccaaggttgttttacggctcatagtgggaacctgctttctggacggcgacgccgtcaaaggtttattcccattatacttgtttacccagtctacgacttgctgcgatccacgaagtccaaacttatttgcaagttcatcaaaggtgccttcgcctataagatatgcgtggactactttgagcttgagttccttcgaatagtgtttgtttttcttagcctcctttagaccattaattccatcacgggagtatcgatctcgccaacgctctagcgtcttacgatcaatgccatggcgattggccaccggacccagtccaatttttgattgggtcagttcatctaagattgttaatttctcgagtaccgtatgtttagatctgggcatacaaaaatccctccatagtcgtcagatgaattattgtatttcatctgacaaccataaagggattatcgcaaccggattcttccgatcgcgcgttttttttgtggcgctaaattaaaaaagaagttcgtcaagggggccaagtagtcgaattgttaagttttaaaaaagtcaatgtggatagccaaaaggaggtaacattagatgtctgtggataagtctgtggattgtgggtataacacggaaaaataagcaccaatgttatccacaagctaataaacggaaagtggataactttttaaaattaaaataaaaagacttaaaatgctgatataatagcttttgtaaatggatacacagtagtgcgaataattaaaaattggtggataactttttttgttagaaagcgttccaaaaattgtgattcgattatttagtggttggtaaaatttaaaccacaagacttgggacgaacacttgtgcatatgtggacaacttttgtggataacatgtacttttcggtgaattactgtgaatagcttttttttagaatcaatttcgcctaaaatagaagtattagctaggaggacgttatgaatatcaaaattatcacagttgggaaactgaaagaaaaatacttgaaggcgggcattgcggaatacgccaaacgcttaagtaaattttgtaagtttgaaatcatcgaagtgtcagacgaaaaggcaccggaatctttgagcgaggctgaaatgacgaccgttaaagataaagaaggcgaacggatcttagccaaggtgaaggataaggaacacgtgattgtgttagccattcacggcaaacaacgtgcttcagaagaattcgcaaaagaaatccaagatttggcaacctatggcacatcagatattaccttcattattgggggctcactcggaacaagtgatgctgttaataaacgcgctaacgacgccttatcgtttggcaaattgacgttaccacaccaattgatgcgcttagttctaacggaacaaatctaccgggcgtttatgattaaccagggatcgccgtatcagaaataagaaaaattgagagcccagacaaaatttgtctgcggttcttttttatatccatcaaagtgacatattatgtcggggcaattttatatactttagttatcgagatgcgtaatctcaactaaggtatttgggggctattagtatgaataagaaattaacggttggtttagcaacggcgacgcttcttttgttggcggcgtgtgggcaacaggctgattcaacgaagacaagtagcaacagtcacagtacggcgcagtcggaaaaacggactaaaaagcaaagtgaatcaaaattgcgggcccaaagtagcgccaaaaaacaggcttcagaagcgtcagctaaagcgatgagcgagtctcgtgaaaaggccgcgcttgcagcatcaacagcggcagctcaagcggctgaagctgcaagtagtgcatccgctagtgaacaagcggcagatggaagttcagcgtctgctgtccaacaagcatcagcaatgacagcttctaaagccagtgaatcacaacaagcagcggaacaagcgattaaaccggtcacgcaagcagaggcgattgaagctgctaagaaggcgtttaatggtattgatattattgtttcgcataacggcactttcagtagtcaacctgatggttcaatgacggcccacgattactctggggcacaaggagaggatttttggactttcacgccgaatgcggatggcacgattacggttctttcgaagtttggctctgtcaaaggtggcgaacaacaaatcgaaacgcatgttgttccaagataatcaccaactcaaaaagcgcgctaagacaatttgtcttaacgcgctttttgaatgtcttatttttgcaagtaatctgcgacataagcgtcgatttctgcgaggtaggtttgtttttggaaatcactaatccacgctgtttcaaatgagttctttgcaaactgaacgacttggtcaatagttaaatcatttttagtagcgatggcttcgtaattatcgttgatatagccgccaaaataagctggatcgtcagaattaattgagactttaacattgtgatcaatcaactcgagaacttctcgatccttcatatcatcggcaacgaggcggttagaaagagggcaagaggttaagccgattttaagttgttcgacccagtcaaccaagtccggattttcaacgatattggtaccgtgatcgaggcgttcaacgcgaatgatttcgagggcttgttgaatgtgttggattgagtccacttgatcgatatcggcatgcatcgtaatccgataaccttgagcaaccgcatcgccgtattctctaaggaacttcaatggtggattgtgatgttcatcggagtctaaaccgataccgagaatcttagcttggtagggtttggcgatttctagtagttggcgcgctgactctgcggaaagatcgcggaggaaacacatgattaagtgggcgtcgacgttgaaggcacgggcatcgacacaagcgcgataaaagccattcacaacagcttcaaaagccacaccacgtgtcatatgagcttggggatcgaaaaataattcggcgtaacggacattttcttggtgggccttttttaaataagttaatgccaattggtagaagtcatcttcagtttgtaaaacattcattgcggggtaataaaccgcgagaaatgatgcaagtgagttgaagttatagcttgcttgaacttcttcaatcgtactttggccgatatcaacgccatttttttgcgcaagggctaatttcaattcgggttccaatgtgccttccaagtgaagatgtaattctgctttaggtaaaccatcaataaagtcacgtgttgccaattgtgtcataaaatctgcctcctaatgaattaataacttggcactagcataatttagaaaattcgcaatttcaagttaaacacgaactatttaattaaataaaataaaattgttcttgaataatcaaatgcattttggcatactagtgttattaatgataaacgggagtgattgggaaatggcaccaatgaagcaatcagggattcaagcaagcgcagatcgcatgtttaagttacaagaatctggcacaacaatgaaacgcgaaattttcgcgggactgacaacgtttgtctcgatggcttatattctattcgttaatccacagattttaggcgaagccggcatggataaaggcgcagtcttcacagcgaccgctctttccgcaattgttggttcgttattaatggcctttttagctaattatccaatcgcgattgccccaggacttggcgataacgcgtttttcacatattcagtcgtcattgcgatgggcatttcttggcagaccgctatggcgggtgtcgtggtcgcatcattgatttttatggtgattaccttattcaaggttcgtgaatacattattgacgcgattccacatgatttgaaactagcgatggccgccggaattggtctgttcatcgcgtttgtcgggttacaaggtggcggtttagtcgttgccagcaaatcaaccctcgttcaaatgggttcattcacggtgccaacaacttggctcacgattttcggtttagtcgtgaccggtgtattgatggctaaaaaggtaaatggtgccatctttattgggatgattgcgaccactattttaggcttagtgacaaaattaattccattaccagcacaattgatgtcagttgcaccaagtatgaaacccacgtttggcgtagggatccaacacttaggtgatatcaatcaaccacaattatgggcagtcgttttaatcttcttattggtagctttctttgatactgccgggactttaatcggtttggcagaacaagctggcttcatgaaaaatggtaaaatgccccgcattggccaagcgttaatggctgattctgtttcaatgatggccggttcagttatgggcacgaccccaacagccgcgtatgttgaatcatctgctgggattgccatgggtggtaagacgggtttaactagtttggtggttagtatattgttcgggttttcgatgttattctcaccattattaacagtcgttacatcacaagtgaccgcgccagttttaattatcgttggtgttttaatggcgagctcattaagtaaaattgattggagtcgctttgaagtggcgttaccaagtttcttaacgattatcgcaatgccattgacttacaacattgcttacgggattgcttttggcttcttagtttaccctgtgacaatgcttgctgcgggtcggcgcaaggaaattcatccggccatgtacgctttattcgttgtttttgttatcttgttgtacgtcattaatatcttaccgaaataaaggagaacgatgattatgtcagatcgcttaacggcttttaaagaattaattcaagctggaggtgctaaacggcccgcagacctcattattaaaaatggtcagttagtcaatgtgatgactgccgaaatttatccggcagaagtcgctatttatcaaggtaaaattgtagcggtggatcccgatgtttcagcttatcaagggactgaaacgcgtgtgattgatgctaagcaacaatacattgtaccgggattaattgacggtcacattcatgtggaatgtagtaagttaagtatgactagttttgctgaagccgttgttccacacggcacaaccagcattatttcaggattagacgaatatatttcagtcattggtgtcgacggtttatcagaaatctttaaagaagttgatcaattaccaatgcgcgttttctggggcgcgccattcaagaccccttacacgattccagcttctaccatcgctgataatattgattcaacggtccaagcgcaactgcaaaaacggtctgacgtttatggcgtttgggaaacggtgcgtgaagcagttgaaacactagacgaagataccttaaaaacattattgagtgcgcaagataaccacgtacccgtttggggctgcgcgccaatggcaacgggcactaagttgaacgaatacttgatgagtggcgtccgggtcgatcacgagagttacgaccaccaagaattattggaaaaggttcgcaaagggatcaacgttgtgattcgtgaatcatcagtgacgcatttcttagctgaaaatattcgcgccatcactgaaacaaacggtcagattgcacggcatgtcagtttttgtacggatgacgttaacgcaatggatatcgtcaataaaggtcatctcgatcatttagtacgtttggcaatcgcggccggggttgcaccaatgacggccatccaaatggcgacgatcaatagcgctgaagcctaccgcattgatgatcaagtcggcttaatcgcaccagggcgcaatgcggatatcttattagtttctgatttggaagcttttgaaattacacgtgtcttggctaaaggccaaccagtggcaactgacgggcatatcgatcacagtattgaacgcccggttcgcccggctagtttagccaacactgttatcagagaggctgtccaagccagcgactttgaatatcatgtggcagcagatgcaagtcaggtcactgttcaaacgattgccagcgaaggaccttttgtccgccatgctaagtctaagacgttagcggttgaagccggcatcgtccaaatcgatccagcaaaagacgttgcgttgatttccgtcttggaacgtttcggtaaaaatggtaaccaatcactagggttcacctcgggttggacgctcaaaaaaggcgcgatggcttcgaccgccgcacccgatgataataacatcatcgtgatgggtgtcaatccagatgatatggctttggcggttaatacgttgatcgaacgcgatggtgggcaggtggttgtggctgatggtcagattttaagtttcttaccattaccaatcgccgggattgtcagcgacgtaacgccggccgaactagccgttcaagaagaaggcattttaaaagccagccaagctattgggagtgaagtggtcgatccgatgttttatatgacgttcttaccaattacagcgattcccgatttagccattactgatttaggaaacgttgattgtaatgaattaagactatttgacccgatattaacaattcaataggtaataaaaagggatccgacaaaataactttgtcggatcccttttttgtaatattgaggtgtttattggttaaacgtgttctgtaacccatatccttccggttaaccctgagcgccaaataatcgccgagcgattattcgtccctctgtgttaatcctcgggataaaatcagggttacgacacactctgattttaaacgtgcttttgccagtaactttctgtgctttgctaaacttatcaaaccggtgatttcatcaccaattcgctaagctctgcaaatgctcaaaagctaaccactggcaatgcactcttttgaaaacgtgctttttgaaactgacttctgcgcttagcgtcactcgtcaaacaactgcttacagcagttattcgccgagctgtgctaatgctcaaagtcaaaccgtttcaaacgcactcttttttgattaggcgagtggttcgccgtccgcttcttgatagcgttgtaagatgtaaatcgcgagaatcactaagatcgccccgctcatttcaacccagctgaattttgagtggaagaaaatgatgctgaggatgaaggtgattacgggttgcacggcatctacgatactgattacggttgatggtgcgaaatttaaactgtgtaataaacaaagataagcaaaaactgtcccgattaaaatgacagctaagattgcaataatcccagaaccatttaaatgaggtggtgcttgccagaatgggcggttgatgttaaataaaatcccactgataaacatcccccaaccaagcactaaaatcggtgatttttcattgacgatagggcgtggtaaaacaacgtaaaacgctgcggtaacccctgataaaatcccccagattaatgaattaaacggaattgtcaatgtatgaatatttcctttggtaattgagaggaaaaccccaactaaggcaatcccaaatgaaatcaaatcaattcggttaggccacttgcgaacaaaggcgagcgttccaattacgatgaaaagtgggctcaagtattgcaaaatagtagccgctgcggcgttcccagtttgaatactcatgaagaaggtgtattgattccccataatcccaaaaagcgcgtaggcgattaaccaggctgtcaatcgcttagatttaaagattgagaagatatcttgtttgaacttaatcgcaccgattagtaagagaattagaccggcacctaaggttctaacagataagaaccaagtcgcagggactttttgcccttgcgagataaattcgaggattgtcccagagacgccccaaagtgcagaagccatggttgcccaaaacatccctttagcgatattttgcggctttagttgatttgtcattgctttagccatccttgttattttttagtaaatccataactatttattataggctaaatgggcgtgatatgccatttacaaagacgaaattttccgaaaatatctcgataattaatcattaaatattcacaaaggaaagctaatatactactaataaacagattacgaggtattgtgtatgaaaaaacatctgaaacaaggaacgatcattctcctaggaatcatcttaacggggctgctcctttttaaattagtaggaagctcatcgttatttaacaaggatatattgagtacgtctcagattatcaaaaacattggtagtcagacaatcaagacgcggcagacgagtcaggagaaattaaccgcgacttataaaaaagcacttaactctgatcaatatacgagcgctaagccctatgttaaggtcaatccttatgggacgtcacctctgagtgcgctggtgttgtttaaaacaaatacggcgactaaggtcacggtcgaagtggtggggaaaaccgctaagaccagcattaagagtgaagttggcaaaaattacaccaagagtcataccatttcggttttagggctttatgcgaactatcaaaataaggtgcgcttaacattaacggataaagcgggccataagacgtatcaaacgattactgtcaaaacagccgctttaccgaaagcaattgcttcgatgtcattgaaggtcaaaaaagcggataagacgaagatgtcaattggcaatagtagcctaacgttcttagtgcgttcaacacaatatccagttggggtcgatgcggatggtgaaattcggtggtattcaaccaactatgttcaacatatttttaaagtactcagcaacggccatcttctgtatttaacgaaaccagataataaagatttagtctacaatgatttgttggaaaccgactttatgggacgtgtttatcgcgaataccaattctcaaccgaaacgcgtaacaatgaatcggcaaatgataaaaccgaaacaaccattatccaccatgatgcgattgaattaccgaaccataatttattgctgacggtttcggatgggggttcaaaatacgtggaggatacaatggtcgagtcatcacgtaaaaccggcaaagtggtcaaagtgattgatttgaagaagcttttaccagctgagctctatgaaacctataaggcgacaaaacgtgctgatggcaagttagattggttccaccaaaattcaatcgactatgataccagtgatgatagcatcgtcatttcaagtcgcaatcaggatttagtcatgaaactagattacaagacatctaaaattaagtggttattcagtagtaaatcggctagcaagtggccattgaaataccgtaaattattgttgaaagctgctgacagccaaacgggcaacacgccgccacaatttggccgaccggcgaagcggaccagaagcaactagtgttgttcaacaatgatatggccgtttcaaatggcgataagaagacgtctggcaagtactccgagggtgtcagctatttaattgatgaacaggataagacgattaagaaaacctggtcctacggcaaaacattgggtaaaacgaattttagtgaagtaatcggctgtacgcgtaaattaacaaatggcgattacttgattgattttgggtttaacgatcaaggcaagaccagtcgtattgtagaggtcgatcccaaaactaataaagtggtctataatttgacgtttaccaactttacgacaattggttatgcttatcgggccgaacggttctcactatatagtcagaattatcaatttaagttatgatgattagtaactaagtagaaacgaggcgcgaagatgcagtatatcgcattattacggggaattaatgttggcggtaagcgaaaagttcagatgaacttgttacggatcgcgtttgaagatgccgggtttacgaatgtgcggacctatattaatagtggtaatgtgttatttgaaacaccagaaacagagctggcggaattggtggcggtttgtgatcaattgatggtcacgacgtttggcttttcagtccggattgcaattgttacggctgattctctaattgcagctgtggaacaagcccctaattggtggggagcagctgctgggacttcccataatttaattgttgcaattgcccctaagacagcggctgagctgagtgaacaacttggaccggttaaggctgattatgagcaggttgctgttatggggcagtttgttttctggagtgcacctgttaagacacatgggcgcacgcgctgggcgacaattgttaaaaataaggcactttaccagtggattacaatccgcaatgccaacaccgctcggaaattagcagctttagcacaagactagttacttaaaagcgtcaaagtggcatatcatttgatattcgtatatacttatggtaacaatccaaaaaagaaatgagtgaagcgatgcgtttatcaaatttgaaacagacgatgctgcaaatgggtttaatcttaattgcgttagaaataattgcaattgggatccaactcttctttgccccccacgaagtagcagccggtggggcaaccggtgtgggaattttattagaggaattaatgggctggcggatttcgacggtggtcttagtgatcaacatcgggatgctgatcttagcttattttctcctcgataaaaagaccacgttaagaatcctctttggtagttttatgttaccagtttgtttggccatcactccgcaggcgatggtggttgaagataaactgttggcgattattatcgggagtgtggtatatgctgccggaatcgccttgttatatcgaattgatgcatctagtggcggttcaaccgtgccaccattaatttttaagaagtattttaatatcaaaccagcattaagcttgttggtcgttgatttattagtttgttttgccaatgtttttgtttctggttttgaaacctttatgttagcaacctgttcatcgattctgacattgattacgatgaattacatcgaaacaggcctcaaccggaaaaaggtgctctacgtgatgagtaacgaacagttggcaactatcaaagaacatttggtggaagaagctgatgtcggtgtgacaatctttgacgtaacaggtggttactctaacgaagacaagcaaatgttgatgttagtggtcgaaaatcaggcctaccaacacatcattaataaaattcacgaagtggacccgctagcgtttacgatagtcggcaacatagcagaagtccgcggcggcagtttataaaaataagcgtgcgttttaaacaataaaaaaggggttgggacaaaatttatttttgtcccaaccccttttttgatacccgaatttttatagtctaaacgtgttatataagtcatatccttgtggttaacgccgaatgtcaaacgattgcttacagcaatcattcgccactctctgttaatcctcaggatatacccgacttatataacactttctttttttacagatggttaaaatagcgttccgcttttaaattttgaacggtgagcatcacgacgaagctgattaaataaagcgtcgagatgaataacatgacggttagaatggaatagtgatccagtaaccagccgataatcacgcttgaaaatccaccgacacagcgaccaacgttcatgatgacgttattggcagttgcccgaacttcagcggggtagaggcgactaacaatcgctccgtagccggcaaacatcccgtttgaaaaatagccaacaagtgcgccgacaatcaagaggccggtcatatttttaggtaaggtcaacacatagacgccggctgcagacgcgagtaagaagctgctaaaagcaacgcgaggtccgatgcgatcgagaatccaaccaaaggttagcatcccggctgacatcccgacaattgttgcgagcatccaggtggaagagccagcaacactgaggtgtaactgttgttgcatcattgttggtaaccagttcattaacccgaagtacccagcgatttgaaccactgccataaccattaaagctaacgtttgatgcgttaattgacgcgttttgaagagggctttaatttggcctttaggtcgtgcttggtcggtgtcaaagttgcgactttcgactaagtgatggcgaatgaagaaggtgataatcactgggaatagcccgaataaaaatagtgcgtgccaaccgtattggggtaatacccaagcggctaaaagtgaggcggcaatcgcccctaattggccggcaacaccgacatatgatgaaacgcgcccgagttgttttttgggaaagctttccgcaaggactgtcatgccaatcccatattcgccaccagcaccaattccggctaaaaagcgacaaaggtagatgagggtgagtgaatttgcgaaatacattgctgcagtggcaaaggcgaagataaaaatcgtataggtgaacgtcttaatgcgcccgacgcgatcggctaaaacgccaaaaaaaacgccacctaacaacatcccgatattagtaatcgttgcgatcagtcctgcttgggtgccactgaggtgtaactcagcaataatggacgataaggcaaaagacaagaacataacgtccatgttttcgagtccgaacccggcggtcgttgaggcgaccaccttagactggtagcttgttaatcgatgttggctgtgtgccgtgatagttttcatattcaattttcctccaaaaaggacgctctctgtcgtcccttattttgctttgtgtcattctagcacagattaagcgcaaacccaaggttaaaaaaatagaaagcggtttaaataaagcgggtaattgattgacgacactgtcataatcttctagtattagaggtataccagtgatttataaaggaggagcgacaatggcaacgaagaaacgacatcattttacttttccaagcgcctatacggtgatcttattggtcttattattagtgatgattttgacctatttcatgccgtctgggaaatacgcgagtttacaatataatacccaaagcaataattttaccattactagcccgaccggccgtgaatcaacggctcccgggacgcaagcaacactcaagaagtaccatgttaatacgagtttagcgaaatttaaggatggctccgtatacaaacccgtagcgattccgaatacgtatcaacatttgaaaaaagccaataccggcctttttggcgcggttaagcagttcttgaatgcgcctattcaaggcttggctgaaacaatcgatattattaccttcgtacttattttagggggaattgtgggcgtcgtgaataaaaccggggcatttgctgccggaatggctgccctatctaagaagttaaaaggccgtgaagcttggttgatcgtgattgtgacgagtttaatcgcactcggggggaccacttttggtcttgctgaagaaacgattgccttttatcccattttagtgcccattttcatggcggccggctacgatgcgctggtcgcaatcgccgcgatttatttaggtagttcaatcgggacaatggcgtcaacggtgaacccgttctcagtcgttatcgcgtcgaacaccgccgggattagttttacagaagggatgggcctcagattagtgatgctcgtcatcggaacagcgatgtgtatcttctataccattcgctatgctgaaaaagtgaaaaaggatcccgaaaaatcattaatttatagtcaaaaagcagaattagaagctcatttcttgggtgatcaagaaaataacgtcgtgcctaagtttgatttccggaagaaattaatgttaatcatctttgcggccggttttgtcatcatggtctttggcgttaaggaatggggctggctcttcaatgaaatttcggccttattcttggccattacctttattttagccttcatttctggcttatcggaaaaagacttcgtaggtgaatttgtggccggcgcttctgatttactaggggttgccttggtcatcgcccttgcacggggtgtgacgattatcatggaacaagctcagattagtgatacgttacttttctggctcagcaatggtgtttcacacatgagcggggtcatcttctcaaccgtgatgttcttcgtcttcatcctattaggattctttatcccatcgagttccggcttggccgtcctttcgatgccggtcatggcaccgttggccgacgtggttggcgttcaccgcgacgtgattatcagtgcctataactgggggcaagggatcatgtcatttatcacaccaactggcttggttttagcatcgttagcgatggtccatgtcacgttcgataaatggttgaagtttgtgctaccattgatgttagcaatcggtctgttagctatgattttactcggcatcagtgtttatctataaaaaataaagaacccggacaaattaatttgtccgggttctttttgatatttgaaactgacttctgtgcttagcgtcactcgtcaaacaactgcctgcagcagttattcaccgagctgtgctaatgctcaaagtcaaaccgttttaaacgcacttcttttttaacgtgcttttgtcagtagctttctgtgctttgctaaacttatcgaaccggtgattccatcaccaattcgctaagttctgcaaatgctcaaaagctaaccactgacaacgcacttctaatagattttaaatttcgtaattggccagtagcgtaacttaacgaccccttgaatcccgttataagctgaggcatcatcactgatgaagccgacttctttgtaacggctatccttagaaacggtccggttatcacccatgacgaagtagtgatgcgctgggaccttcttttgacctaaaacatctttgagatcaaaagtgggaccgtttgttttggggttaagtgtgaagtaatctgaaccagcgaggtaggttgaaaaatcagccttataggctttgagatatggttcgctgacttttttaccattgatgtatagctggtcgcgatcgaatcgaacggtatcgccaggcattccgacgattcgtttgatatagaattcccctttagcatcaggtgctttgagaatgacgacatcgccccgtttgagtttggcgtggcgaagcgcgataacgcgatcattttgtgtaaagttcggttgcattgaaggtccaaaaacttgttcattggaaatcacgaaggttaataataactgtgaaatacccaccatgacagcggctaataggacaatttgtaatgttgatttccaaaattcttttgctttatttgacattttggcacatccttaaaattcagtaccttcattgtactacaatcaaatgcttgatgacaacaaagtcgtatagctacttaacgattaacgggccatcttatggatgctttgtcgttcttggcgatcagattgcgccgcagattgatcgttgattgactggcttgcgattaagtaaccgacacatacgattccaactaatactgcgagtagacgcgctttctttgacataataatccctccaagtagatgataaatttagtttagcatcgacaagtggttctcaccatcgaacgaactaacgaaattgaagctagcgtgacaattctgttatatttatgaaaaggtaaagaggatgtctctcgacaaggcgttcgtggtatactagaggcattatttctaagaggtgaaagtaatgccaataattgaagctaattttacacccgtattactcggtagtgattttaatgtttatggaatggcacgctcattctatgaattaacaggaaaacccgtgcaagcttatgccggtgctgagcttgccccaacgcgctatacaaaaatcgtggatgtggatatcacacctggtttcagtgaagatcccgtcttcattgaaaagatgcgcgacttaattttaaaatatcaaacacacacagaaccagtgattttaattggttgtggtgatgggtacgctgaattaattgctaaacataaaacagaattagaagcagcctttgtttgtccttacatcgattatgatttattaaaacgtttgaataacaaggaaaacttctaccaagtttgtgaagaattcgacttgccttatcctaagactaagacaattacgcaacaaatggtgcttgatggtcaagtggaccaaccttttggctacccagtggcgttaaaacccgctaactctgttgaatggttagatgttcattttgaaggtcgtaaaaaagcattccggattcaatcacaagctgaattcgatatgattattaaaaaaatctatgacaatggctacacatcagacttgattttacaagacttcatccctggagatgacagtcggatgcgtgttttaaacgcctatgttgatcaaaaccaccaagtgaagatgatgtgtttaggtcatccattattggaagatcccgcaccatcagcaatcgggaattacgtggcgatcatgccagaatacaacgaaacaatctacaagcaaattcaaactttcttggaagccatcaagttcacgggttacgccaacttcgatatgaagtacgatgaacgcgatcaaacttacaagttatttgaaatcaacttacgtcaaggccggagtagcttcttcgtcacattaaatggttacaacttggcacaatgggttgttaaggattacgtgactggcgaattgaaggaccaagcaacggtttatgccaataaagataatgatcaagcagcactttggttaggtgtttcaaagggtgtttttgaaaaatacgcgcgcgataacgaagataagacaaaggctttagccttaatcaaagcgggtcgttatggcacaactttccaatatgcaaaagataacaaccctaaacggtgggtattaacacaatggatgttacacaattatcgtaagaacttcgcacgttattttaaagaaaataaagggtgatcgcgactatgaaacagttttttacagtgctcggcggcatgggaacggctgcaaccgaaagttatatcagacttcttaatcaacggacaccaacgactaaagatcaggatttcttgaactatatcgtggttaatcacgcgacaattcctgatcggtcaacgtacttaatggaccacagtcaaccaagtccggaacctgatttattggaagatattcaacaacaaagtcttttgaaaccagccttttttgtcattgcctgcaacacagcgcattatttttacgacgacttgcaagcagctgcctcagcaccgattgttcatatgcctcgggaaacggtcaagagtattcaaacaacctatccagatgctaaacgaatcggtattttgggtactaaagggactgtgactgatgggatttatgatgaagcattgttagctgaaggttatgaagtggtgaaacctagtcttgatttgcaagaacggacgatggatttgattttcaatgatatcaagggccaatcacagatgaaacctgagaaatatcatgctattctagcggagatgcaaacacaatgcgacgcgattattttgggttgtacagaattgtcactggcacaagaatgggcacctgaccatgattttccagtagttgattcacaatccgtcttagtggatcggtcgattgaattaggccttaagttacgtgaaaagtgagtttgaaaaatggcgaatttagtaattgttagacacggcgaaagtgtcgccaatcaactgaagacctataccggttggtcggacgtggcgctcacgtcaaaagggcgacagcaagcccatcaagttggccggcagataaaagacgctggctttcaatttagccacgtgcacacgtctttattgaaacgggcaattttgaccagttacattgttttagaagaactcgatcaattggcgctaccaatgactaagagttggcgcttgaatgaacgacactacggtgctttgcgtggcttgaacaaagacacgacgagaaccgtttttggtgtccaccaagtagcgcgctggcggcgcagttatacagcggtgccgccacttttaattcggtcatcaactgcgcgtcgctatcgcttagtgccacgtaagagtcgaccacgcggcgaaagtttggcgcaagccacccaacgtttattaccttattggcaagatcaagtggtgccggggttacttgctgggcaagatcagctaattgttgcgcatggctcgactttgcgtgccttaattaaggttatcgaacaaatttcagatcaggccattgatggcgtggaagtcgcaaacggtgaagcgctttattatcaatttggcacagatttaacagtactcaagaagggaagactagcactaggtagtgaaacggatgaagagaaagaaaattaatattgccttgacgatttgtgttttagtattaggtgtcagtctgaccttttattttagaagacaatttggtcgacaggggcaagcattggctaatacgcaaatgcaattgaagttaaccaaaaagcagttagatattcagcgtgccaaagtcaataaaaatgatattgatgatcgggtggttaatgaattaacgacgccagagcaggcatatttaaaacaagaattattagataataatttcagtggcaccattttaatcgttcgccataatcatgtcatttatcaaggtggccgtggttacgcgaatagcgaacaatttacgacgtccaaaacgacgtatcaaattggctcggtgcaaaagtcacttactgcggcactcgtgatgaaggctgttgaaaatggtcagttgaaattgacggatcatctcagtcgcttttatccacaaattcccaaagcaaaccagattacattacaaatgatgttggatatgcgttcagggctttttgaaacgagcgcgcctaaagttgttcaaactgatgcacaacgtctccaatttgcaatcaaacatttgcaggttaaaaagattggccaacatgcctattcgccagtcaattatgtcttgttagcggggcttttggagcaagccacacataaaagctacaatgatttgatgaaacaacagattattacgccgttgggggttcaggcctttaacttcatgccaaacttttcggatccacagcatgcgacggcttatgcctaccaaaaaaatggggcatacggtgcagaaattgaagacccggcctatatctatacacgggaacttgggacgggtaatctctatgcgactgctagcagcttgtatcaagttgaagaggcaattgtgcaaggtaaggtctttaagtcgaagtacttacaacaattacggcacaccaataatggccaatattcaggtggtgtttataattatcgcgattatttcactagtcacggtattgaagcaggctttgaaagtcatgttcagatgtcccaaaatggtgaatcagggattattttattatccaaccaatataaatcaacaccatcgttggtcacgatgagtaagcaaatttatcaacaattactagtctaaaaaaagagcgcgagacaaaaaataacttttgtctgcgataatccctttatggttgtcagatgaaatacaataattcatctgacgactatggagggatttttgtatgcccagatctaaacatacggtactcgagaaattaacaatcttagatgaactgacccaatcaaaaattggactgggtccggtggccaatcgccatggcattgatcgtaagacgctagagcgttggcgagatcgatactcccgtgatggaattaatggtctaaaggaggctaagaaaaacaaacactattcgaaggaactcaagctcaaagtagtccacgcatatcttataggcgaaggcacctttgatgaacttgcaaataagtttggacttcgtggatcgcagcaagtcgtagactgggtaaacaagtataatgggaataaacctttgacggcgtcgccgtccagaaagcaggttcccactatgagccgtaaaacaaccttggaagaacgcattgaaattgtcgagtatgtcaccaagctgaatcattcatacacagaggccgctgaacgcttccaagtctcttatcaacaagcacgttcatgggtgatcaaggccaatcacggcggctatgaggcgctcgtggacaaccgtggccatcacaaagaacaagctgagctgactgaactcgataaagccaatcttgaaatcaggcagctcaaagcacagctcgcagacaaagagcttgtggaggcattcgcaaaaaaattgctggaaatccagcgcagggggtgagtaaacaacatcgactgtcttacttcgcaattaatgaggtcagtcaaggcaagcgtggtgcaatatctacgctgttggccgttgtcggtgtaagccggcaggcttactacaaagggttaaatcgagaagaaacagcttgggaagcccgtaatcgtcagctcaaggaacggacacaatactggtttgattttcatcatcaaggtatcggtgctgggaaccttttattgaatcttcaacatgatgacctaattgacttccccgttactttcaggatggtacgtcgtgtgatgcgggagctcagcttgacatgtcaaattcgggtcaagaagcacagtcgacataaggagaacgaacagcacattcaagacaatgtgctcaatcagaacttcgacgtcgacagtcctaatcaggtctggttgtccgattcaacggaactgacttacggcgtaaataataagtataaggtgcgcttgagtggcgtccttgatctctacggccgacgtttgttgtcctacaatttgagcactactgaaacgtcagcagcagaaatcgaggttttccaacgagcctttgaggcttctggcgacgtccacccattggttcacactgatcgaggatcagcctacacctctggtgccttcaacaactttcttggtcgttacaacgtcacacgtagcatgtctcgaccaggaacaccatacgacaacgcaccgatggagcgctggtggaacgaattcaagttacggtggatggctcgccatccactagcaaagacttgcgaagagcttgtaagactggttgaggaaggaatcgaatatttcaatcaccacaaccgctcagcacaaagaaacggcctcaccccagatgaatactggagtgaagccgcatagagacagattcaactttatattatttcatttgtcaacttgacagggcctagtgcagtcctgcgctctttttatgcgttagttttaatcgtttgtttgaaatggcgggcgccaatcgtgaataaagtaaagccgattagacaacctacccagttgagaatgatatcgctgatagcgaaagtccctaagtaaaagacgtattgaagaatttcaattcctaaaatggtaagcaatgcgataatgttggtttcagtgaaatccgcttttaaactatagagaccgcccagtgggatgaagtagatgacatttaatagggcctccagaattgtacggcgatcatgactaataaaatcaaatggattcaggctgacagcatggtaaacactggcttttgtgaacaatacgatgaagagtagcaggagatagacgctataaatcaagtatccgtaaatcggtgaaaggcgctttaagtcccactgaatccagcctaaccagagcgcgagggtcaaaaagagaattaataggacggtcgtcttaggaaatctagccatcacacgggttaagcggggataaccccaaagtgtgggtaaaacgatgcgatgaatgaaggctctactaaagagaaaagataaaatccccgccagagaatattctaatattttacgcatgagaacctcctaaaatagtgcttttttaaagtttagtatggtgtaaacgttctttgaattcagccataaagtcgaaattttgagtatctgataaggtgttttctaatttggtgagcagctgattaagcgttgcttgttcttcacttgaaaggctgctaaataaggtttccgtaaactcatcgcggccatcaaaggcttcttggataatcgcacgaccagctggtgtgataaaaacgtgagtcacacgcttgtcatgttcatcagattgacgttgaatatagtctttagcagccagtttattgaggcactctgtcaacgaagagggccgaatcgccaacgtttgagcaagcgtgctttgcatttgcccattttgttgatggagtagttttaaaatgcgaatttgactgacagatttatggtgcgatgaaaattgcataccgtaataatggcgatagtggtgaatgactttattaaaggtctgaaaaagatcgttgctaagtgtcgtcattgcgactccttcaagtttaaatttaagtaactggtataggtataatacgccaagcatcaaggtaaagcaatattgttcaacctatcacatcgctcacgtgataggttgaacaatcaggctaataaaaaaaccacgaccaacattggtgtggctttgagcggattcacttaattagtgagctgattttaaaaattcgagtgccgctgcataatttggttcgtcagtttgttcaacgattaattcttcgtagctgattgtgccatctgcttcgacaatcataattgaccgttgcaacgtattattgctaggaacgtataaattgagggctttaccgaagctcaaggcttcatcggagaggagttgcatcagttgaacaccttcagcggcacaccaggcttgttgttgttcaacggtattcgttgaaacggtgtagaagttgatatctgtaaattgatcaattgcttgattaaagtgttttgtttgaatgctgcaaacacgtgtattgatatctggcacaatgctaatcaatgttcgtttgcccagtaattgttgggttgtgcgtgtttggtgatctgcatcaaccaattcaaaagcgggtaattgctcaccgactttaggtggtgtcccaattgtctcgagtggttgatcatgtcttgtaatttgcatcttaaaaccccatttcctagaagatggtttcattttaagctgaaagcgattgaaacacaattaaacaggcttatgataagcttaattaaaatgaatgatgaggtggttattttggaaactaaaaaaattcaggcgctctatgccaaaaagatgtttaatcaaattgtcaaagaggtgaatgttaagccgttatcctatgaagtagttgacgcaaacggagatgaaactgccgtcttaattggtcagacgcaatgggcgcaaattcagcaattgttagtgattaaaaacattgatatagcagacatcgactcgtgatagtaatttaattgtaacagtcctgtaacagtcagatgatacactgataaacggataagaaatatggacggtattaagtagttaattatattaaaaacaggagtggacaaagtgaaaaaattaggtaagttaatggtcagtgcgttagcgatgttatcaatcagtgcaccaattgcgatgagcgtgggtgttgttagtgccgattcagtaacagatacaaaggctgccattacgaaaactagtgctgaaaatgccgctttgttaacgaaattaaacgatgctcaaaataaagtgtcagaaatcaatagccaagtttctaacaaggtcattgccattgatgatgctaaagcaaatatcaagtcaattgatcaacaaatcgttgcacttgatcaatcaattgaaaaagctaaagctgaagtgcaagcccgtaagagcgtgatgaagaagcaagctgtttcacttcaaaaagaagcgggtaacagcgtctcagggaacgtctatgttgattttatcgtcaatagtgataacttctcagatatgatgagtcgtgcgtcagttgttggtaagttaaaccaagccagcaaagaagcgatgacagctgttagtgattcagaaagtacattggcaactttaaaaacaacgcaagaaactaaaaaggcagatttagttaaaactaaatcacaattagaagctgatcaagctaaattagtgactttaaaagatgacgctgaaaaagaacaaaagcgttttgaaacagaagttgaaggtcataaaacacaattagctaacttacaaagccaattggattcacaaacggcagccgctgttgaagccgctaaacaacaagcggaagcagacaaagccgctaaagctgaagcaccaaaaacggcaacaaaatcagaatcaacatcaagcgatattaagaacgaatcatcagacaaagctaagacagaatcagttttaaacaataatactggtgcaacaacaccaagtaacaacagtaactcagcctcaaaagcaacaacaaagccagttgctaacacaggttcattagtgtcaaacgcactacaatttattggtacaccatatgcatggggtggtgcacaacctggtggctttgattgttcaggtttagtgatgtatgcagctaagatggctggtatcagcttaccacggacatcacaagcacaaagcaagcttgggacacaagtgtcattatcagaattacaacctggcgaccttgttttctggggtggcgttggttcagcacatcacgttgggatttacatcggtaacggttcatacgttcatgcaccagcacctggtcaaagcgtaacaaccatgtcaatgcaatattacaaacctgactttggtcgtcggatttagttaagcaattaatattaaacagaaaaaagtttggctctccctgagaaggaagggtcaaacttttttagttaaaatagatgagaagtgggataaaaatggtagaaaaacagttattagtgattacaggcgccaccggtagtggtaaaacaacggttagtcattggttaaccgaaatgtatcagattccccaagtcgtaacccatacgacgcggcctaaacggcataacgaagtcgatggtgtggattactatttcgagactgagtcatcgcttgcacagaagcatttaatcgaatcagtgacttattcaggctatcattatggttcttcacatgaagcgcttgagctagcttgggcgaagtccccattgatcagtttagtggttgataccaaaggggctcagacctatctggaaacctttggcaaacaagtaaccgtcttatttttaacggtctcggaagcaacagctttaattagtcgcttagaaaagcgtaatgattcaccagaagcaatccaaaaacgtcttgcgagtgcggaatttaaacgggatttaatggtttcaggaccgttacatgatcaagcacagattattgtgaatgatgactggcaagaaacgcaaaagacattgacgacaattattgaacagttacgtcaataacaaaaaagggaagtccgacaaaacgttgttttgtcaggcttcccttttaacgattagtgcttaagcaagttgtcgcttgtttgcacggttaggttgtttcactttaaatgttaatttttggacagcttgttcaattgtaataccacttgcactgattttttcattgttcgttgcagttgcgataaatttttgagtttgcgtatcaagtgaaacatgataccaattattagttttgttttgtaattgcataattaaaatctcccttcaaataactaaaacactggtagaaggccaatgaagacggtttcctaaaaaccatctgagtattatcataacgcttgaccgggttaattgcaactatttttactcgagtttgattaaaatttgttaaaaggggaaattgtttttcatcacggaccgttataagagcgtataataatagtgtgtagcaattaaaccatttaaaactaaaatgacgacgattaatgctataatcagttattctgaatagcaggtattaagaaaggaaccgattaaaatgagtgaaatgacgacggcgctggccgttttaaaagcaaacggatttaagatcacaaagcaacgtcgcgaaatgttgacttatttagcgcagtacgaaaatcattacatcccagtgacccaaattgacgatcatatgcgggcgattttcccagggatgagtcatgataccatttatcgcaatattaaagactttgagcagctcggtttagtcgagcaacaaactgaaggcggacaagctcatgtgaagtatcagtgtgattttgaacatcgtcaccatcatcactttatttgccgtaactgtggcaaggtgattgagttgaagatgtgtccactggatttcttcagtgatcaactccccaactgccaagttgaaggacatcaatttgagttatacggtctttgtgaagactgtcaagaaaatgaatagataggaaggaagagtgttatggcatttcatacgcccccaatcgtgcccccagcagcgattatttcattaattattgcaatgagcgcaacgaacgtcgttgttaatactgttaaaccggtcgctaatattaagacggagcaaaagacttccgtttcagaaagctcacaaagcagtgtaagcaatagtcaatcagcgagtcgttcagaaagcgatgagacgactagcagccaatcatctagcgaaccggaagaatcagtatcaagcagctcggaatcaatatcaacgccgtcagatcaagaacaatcaagtacagataatacgacggaaaccagctcaagcgagacgactgatacaacgcaaaacgacgagtcagctgattcaagcgatacaacaagtgatactcaaacaacaactaataacagcagtagtgcagcgtcatcaacagggacatcccaaaacgtggccaaggtcactagcggtagtgcaacgcaataacgaactgctgttaatattgaaaggcggaatgcgcaatgttatcttttttggatatcattaatcattattttggctacttaaacattaataatcgggttaaaaaccgaattttttcaattatctgtctaatcggtgatttttacttactatataagagcatctactactttagagcacaagcaattggacgaggcgtgattaatctaattgtttttttagtattactctattttgcagtgatgaatctttatttctattatcgtggtcgcaacgcggttgtcgatgtgtcaccatacgtcgaaaaggcgctgggtggcgatccaactgcgccacatcccttagctggacaaacagctaagcctaaaatcatctcacaagtccagccagcaaccggcttatttgaagagaaggatttgctaccagcgcaactagaagtcgatagtgcgcatcaacaacaactcgaccaattagtcgcacaattaattgaagccggctatatcagtttaaattacgctgggttggcagatgccgatatttacgagcaagcacaacatttccaacgcccaatttatgcaattggtgaacgagtggccttgccgttttatgagcttaaacaagaagacggtcagtgggtggttcatggtggcattaacgcgatggccaaggcaccacttgctgttatcaaatcagtggggctcacaccaatccaggaattaaccgatcgttatcaattagcgattgcccacacgtggattactggtggaccacataagatggctggccgtagtggggttgttgaaggcagtgatccttatcaattaatggttcaaatggcctatcaaaaaagagtttaaatctaatctggaggaaaatgagtggaaatccataatgaatttctagatttgaattatcgttatcaatattatttattagaattagtcgctgatcatggggattactatctaacagtaaatcgtgcgatgaaattattgggcttatctaagttcaaacttagtcaatatgttgagacggttaatgcggatttagcgatgatgagccctgagagttatttgagaattaatggggatggcatctttgaaagtggccatatcagtgaatcaatcgtccgtaaaattcgactagactacttacaacaatccaatttattcaagatgtttgaatttagtttattgaatccaggcaaaaatgaaacgactgacttttgcgatgctttattcattgggaaaactaagttctatgaattgcggaaggaaatggtagaagtcgcagatcattttaatcttcaattcaaaaaaaatcagttgattggcccagaaatgcagattcgctagtttgtttttgaaatttattatagttactttaatggcattgaaaaaacattggcgttattccaagaaactgtcgaccagatgttagtgacgatgcgcgatcagtttcagattaatctactaccaacgacaattacaaagttggagacttatctcaaggtacaatcactacgattacggggaaaaaacgcgttaactgaccccttattagcgcctgattttaagacgcaacaaccgcaactatggcagccggtattgagtatgctgacgactaactatcagttattacgaattccgctagaagtggaagcagaaggtctactgacgtttttatttaccgaaagttatgtaccacttgaaattgactatttaacaccggaccttaaaaatggtgtatcgcaaaagaccggccaatttgttaacaaagtcgagcacgtcttgatgaaagatgaagcacatagtgaacaagctcaaaatattctggctaacttagcgcatgatttagatcaaattcatgtaaagcatctaactttttacacagaaccaacaacctttattgatgaacaacaattgacctattttgcagaagcaaatccactatttcatcaaattattttgacgtttacgaccaaacaagaaacggatttggattggcgtaaacaggcgagtttgtattatgattacatgtttgcctgtattgaagatattccgctcgaaatattaaaagatcgtgtttatatttgtgtggatttctcacaaggtagactctataatcagtatatgaaaaaaacagtcaactactttaacaatctgaatatcgaagtgcaaacgaccgttgatgaacggaccgacctctacctatctgatttttactcgagcacgttgacctgtgaacaattaatttggaagaatccgcctactattttgaactggcagcaatttggggatttagtggtcgcgattaaaaaggggaaactatgaaatcaggcaagcagattctcgccctaacaattcttagtttaggcgtttatcgtttttcacaaacttttttgatgcaacaagttcaaaaagtatcagcagcagatactgctgttggaaaagaaaattcagacgctttaacgggtaatgaattgaatattacggttaaaaactatccgacaaaggtgattgagtcatcatcagactcacagtcttcaagttcgtctgcccaaacagagtagccagtttcaaagacgcaacctgatcaacaaacgactaatcaatcgacaacaacggcccaacaagttcctgcagcacagcaggatcaatctaagacagcaaatacgcaagaagtagcagagcaacaacgtgcagctcaaaaagcgactaatgcaagcgataaatcaacagcggcgcaatccgttgcgcaaacgacccaggatcaagctaaagctgctgaggcaacaaccgctaatacagctaaaaatacccataaaatcgcaaaaaaaacgattaagaaacatgctaatgcaagcatccaagaacatggaaatcaacaagggcaagacaatgcaaatcaagatcaacaacaagcagattttttgaagcatcacgctcaagttgaaaaagatatcgcgatgttccaacaaagtatgagccctaatacaccatctggcggcgcaacaactcaagtcggggcggtctttggtgcactagcaggacaaggggtatacgctgttcaaaatgaaattgaatgaggtgatagaattgaagcaacagcattattttcggaaactaacggttattctgacggttgttagcctaatgctgagcctttttgatatatccgcattagcagcggcaaccgatactaagaagcaatcaccaattgaatcttttgtaattcgtgggcttgatgataatgaacaagctgttcccaatgctaaaatcaatttaaaatcagagaatggtaaatacgactatacgttaagttcagataatcgtgttttttcaaaacagtcgttgagacactaacagggcataccgttcgtggcatcatgcctgggaaatatcacgttagctcaattgctgcaccaactgggtatcaattggaaaaatctaatgaactaattgaaattgctgcggatcaagctaatttctatcacttatactacactgatgcgagtcaaggcgacttagttgttaagacgcaattacaagacggcacaccggtgtctggtgttgttttaatggcggttaatcaaaaaacaaatgaaagttacacggcaccagcaagtgatgacgagggttggactaagttgacattaccaacgggacgttatcaattgaaagtgatttttcacccagatagtagtgaaccacagtgggctccgactgtcacggttagcgctaatcaatcgttgacgacgacggttgtttttggcaagaccaaaggtgagatgatgacaacagttacggaccaaacaactggtgatccgcttgtcggtgttcagctacatttacagtcaattaaggatgcaacttatcagaagactggaacgactgataatcatggacaggtgaattggacaagcttaccaactggcgattatcgcgtttccgttacaaagatgatccctcattacagtgttgtaggcgctaatgatcaagttataacggttactaaagataaaacggcgcaggtcaatttttcggcaattagccagactaaaatgttaaagattaccagtctttcagaatccggaatagctttaccacatgtgagctatcgtgttacgacgatggctaatgaacaataccgaaccgttcaaactgatgataacgggcaggtaacagttgggcaattacccgcggggcgttatcagattcgagaagttgcagtaccggatggctatcaattggctaacatttcccaggaaataacccttgatcaggaaacaacagctgtttcgtttgttcatcagatacaacgaacggatgcgaaacatgacgttactttgaatgcgtctaatgcgcaaggaaaagcgctagctggcgttcaactaaagctcaaactgatgggttctaaagaaagttatgagcgaacagttacgacaacggcaacaggtaaagctactttggcagctgttccagtaggcgactatcaagtgacgcaagaatcaacggtggcgggttatcagccagccactgctgttcagtcattaacaattagtaacgaccatcagaatactgtagattggcaattgcaacgaacggtagcggatgttacttttagagttcgcgatgccgcaacgcatcaaccgttagccaatgctgcttttactttaacgacagcaacgccggctgataacggtcaaactgtttttgtttctcaaaagacgaatcaagatggtgaagtgaccattaagcaagtaccaacaggcgaaataacttacgagcaaattgccaatgctgcgggctacgagccactagcagcgattcaaacggcgattgtgggtgctgatggggcacaaaacactgaagtaacagttgataatcagcggctaaaagtgactgaaaaacagcaaattatcgtgcataaaaccaatcaacaagggcaagggctagacgatgcggccattaaattaactaatttggcaactggtcagacacaaatgcaaaagacggtgtccgggcaactacactttactgagttgaacccaggacggtatcagattcaggaaacaaaagctccaactggctatcagttggatcaaacacctcagtttgtgacgattaaagcccatgaaaaacggttataccaagtccgctttgctgataaacgtgaagtgactgcgccaatcagtccattgcgcattcagattttagataatcactttcaaggtgttgctggtgttttactgcgactaactgccgatcaaccagatgaccaaggtcagaccgtttgggaattgacaactgatcgattcggacaggctatactccccaatgcaagtacggggcactatcgggttgaggttttacaagtaccgaccgggtatcaattgtcgtttgatcaaagtcaattagatgtcagccgttatggtgaaaatcagttacaattacaagctaatcgaattgagatgccattgcaaaccttaacgattaataaaactaacttaaaagggcaacctttatcaggtgctgtctttaaagtcgagtcactgaaaactggtcagatgactaaagttgaaacggatcaaaccggtcgggctgagttgccggaccaaaaaccagggcgctatcgcgtaactgaagtggaagcaccacttggttaccggttagcaactgaacctagaattgtagcgttgtctgaaaaatcaccgcgagcaacacaactaacggtaacagatgaagcacaaatggggcagttactgattaagcatacaactaaaaagggcgcaccgattgcaaaggcctactttgaggttaaggatcaaagcggtcgagaagtcggttattatcaaactgatagtcaaggacagattaaattgacccaactagcagtggggcaatatactgttcaagaaatcaaggcaccaactgggtacgaaattaattcggcagtgacaaaggtggccattacggatcgtaaaacggcaacggtcgccattaaggctgagcaacaagcacccgatgttaaattggggagttttgtattgatcgatagggatcagaaaacgcagttagcgattgctggtgcaacttatcgattggaaacgttagctggtcaggtggttcggccagaaattgtagtgggtgcaactggtcaagtcgtagttgacgacctcacacctggtcaatatcgactcgtacaattgacggcggcacctggctatcaaaaacaaactaacgatcaaatcatcgagattaaacaggatgcgcaacttaaacaagtgacgattgaaagtcatcggtcacaagggacagtcattgtaaatcaagtagatggcaatacgaaccaagctttggttggagcgaaatatgaattacaaaatcaaagtggtaaagtgcttgtcgaaaacttgaagagcgatgaacatggtcaagttcgcatcacacatctcgatcctgatacgtaccgtttggtgcaagtatcggcaactaagggctatgatccgcttaaaaagccgattgtctttacgataaccaatcgctaatcaaactattacaacttttcaaaaattgttgatgctaatgattaatgattgtttcgcgatatttttcaaatctaaaaaaaccccgatatttattcgctacctgctggtatagaataaagataatcaagtaaggttgttaataccgaacgaagtggggttatcaaaatgtcagtatattacctaaatagaaaagatcctgtaagcgaaatgattaaaacggttcaagccggtatggcaagtcttagttattttgaccacctagaagaaatttgccgtgacgttaatatcagtttagacgatgctatcttattacaacggattaatgagatgacaacgggtcgatatgttgatgcacaaattgtattcagtgcgggattggttgaagaagacctctatcgtttaaaggatgctggctggctcttagggatgcgcgatagcgaacggacaaaacaaatacgtgatgttaagtccacgtgcgcaaaaggccttagaaacgatttcaagtgcctatgaacaagatggcccagtaatcgcccctaaaattgattcggctgatgtgcaacggattatgcaagcagcggataaagtttttcaaaaatatcaataattaaaaaaatagcgtcgaaaacaattactgttttcgacgctgtttttttagttattcttgaacatatttttgaacggcacctagtaaatcagggctgatttgtgcccgaattttagtcccttcttcttcataactttgttccagaatgttggcgcgttcgcttaagtaagcaaccgcttggccttctgtaaacggaatgagaaaatcaagagttggatattgttcaaagagttgcttgttgatgagcgcgattaaagcatcaatagcaacctcatcacgtgcagagtaaacgatttgtgtgccatcgacttctgggtagcgggtatcaggttttaaatcagctttattgtaagcctcaatgaccggaatatccttaacacctaatgagtcgagcgtttcttgtgttgttttcatcatatcgaggtaattaggatctgaataatcgacaacgtgaatcaatagatcagcacccgcggcttcagccaaggttgatttgaaagcctggatcaagtgatgaggtaatttagtaacgaaaccaaccgtatcacttaataagaatttctgcttgttaggaagaacaatttcgcgaacacttgtatcaagggttgcaaataacatgtccttttcaaaaacttgtttttcaggtgtgtctggattcaaacgttgtaaaatacggttcatcgttgttgatttaccagcattggtataaccaacgagtgctacaacagggaccgcatttttagtccgttgacgacgttggacttcttgttgttgatcaatttgggctaattcaccctttaatttagtaatccgtttttcaattaaacgacgatctaattcaagttgtgtttcaccggccccacggttagttgaaccaccgccaccttgttgatccagtttgttttctgaagggtgtaaacgtggtaattgatattttgcttcggcaatcgcaacttgtagttgggcttccttagtcttggcgcggctcgcaaagatttctagaatcaattgagtgcgatccagaatactcatttctaattctttttcaaggtttctaatttgtgaaggggatagttcatcgttaacgacaatgatatcagcgtcagcttgagcggcttcagccttgatttcttggactttacccttaccaaaataagttcggtgactagcttgatcgatgttttggcgtacttcaccaaccacttctaagttatcagcgcgggctaattcgcctaattcacgcattgtgtagtcaaagtttgtttggcgattgctaacgccagtaattaatactcgtttttgtgccatttttgtttcttgcatatgagactccttttttgttaagttggccctctttaagggaatcttctgcattaaaaaagaagctggtaagcagcttcttatcgttaattagcagtattataaaaatagagtcaatagaagcgcccttaaaaaaagaccaaacagttattcaattattaaacctggacgatcaaattgagttgacatgttattgacgctcctttaaaaaatctagttggttaaaacggccgattcaacggctgttttcccgttaagtgtaacatgaaacaattaaaaagccaatcgtcagtaaaagacgattggctttatttaaattattcagcgtcatatgccttttggaaaagggcaacgatttctgctttagttgccttacgtgggtttgaaaaggcgttgccgtctttcaaagcattttcggccatcatttcgaaatcggttggtttagcaccgattgctttgatgctagttggaataccaacatcggctgccatttggcgcatccctttgatagcaagttcagcggcatctcttgttgaaagagcatccgtattttcgcccatcgcgcgtgctaactctgcaaaacggtcgggacaagcgacgatgttgaattcttcaacgattggtaataagagggcacaacaaacaccatgaggggcatcatattggccacctaattgatgggccattgcgtgtacgtaaccaagatcagcgttattgaaagccataccggctaacatttcagcttcgcacatcttggtccgcgcttcgatgttatggccgttagcaacagcttcgcgcaagctttcttcaatcaacttgatggcttggagacattggccatcagtaatcgcattacggttggttgaaacatagggttcgatggcttggacaaaggcgtccatcccggttgcagccgttaatttagcgggaacatctaacattaacattggatcgttaaatgaaacgagcggaatattccgccaagaaacgacgacaaatttaagatgggtttcttcatttgtaataacgcagtggcgggttaattctgaacctgttccggcagttgtattaaccgctaatagtggtggtagggcgttttctaaggtttcaatcccagctaatttggtaatgtcgtcaccgttagtgagcaagataccaattcctttaccacaatcgtgagcggaaccgcccccgacagtaatgaggccatcacaaccatcagcgaggtattgcgtcttgccggcttgaatattgcggactttaggattaggttcaacaccgttaaagatgctatattgaacaccggcttgatccaatgaagcgagtgtttgggcgacaggaccatcaggaacaccttctaaaaaagtatcagtcacgattaaaggtttggtaatatttaacattttggtgcgatcaccaatcttttcgatgacgccagggccaaaaaagttaacgctaggcattaaaaaatcaaagtttgttttcataatgatggggctccttattctgaattatttcacaattcaatgataacgcttaccgaagcgaaacacagcggacaaagtaatagaattgtccattctaagtagaatagcggtatggggtattttatgttagaatgaaagcgttacaaataacgaggtgttaactttttgattaagttcaaaagttaacaattgttatcttaaataataattgggggggattggagaatggctaatttagcgctgattgatgttgggggaacaaccattaaatttgccttatgggatggtactgctcataagttaacaaagcagggaatggttgcgacccctaaatcgctaaatgcttattatgcagcgttgaccaaaattgttcggacatatcaattgtcagatcaaatcgtcggcgtgggaatgagcacacccggggcagtcaataaagcgactgggattattgaaggtgccagtgccctcccgtacattcataattttgaaattcaaagtgcattagaaatgcgatttggattacccgtcattatggaaaatgagattaattgtgcagccttggccgaattaggcagtggttcagcagagggcttacagaacgttttatatttggcgattgactcagatgttgggggtgcggtcattattgatggacacattcaacatggctcgcatctgtttagtggtgaatttggtgcgatgttaatgtctgatggtcatccgctaagtgaggtgggaaccattacttatttaacgcaacaatataatcaacaagcccatgctgaactgacgggaacggaaatttttgctttggcgagacaagacaattctttggcacaccaagtgactacggccttttatcaacatttagcgcaagctatttataatttacaatattgttttgatccagaagccattattttaggaggcggtcttgaaaagattgattttttagtcccccatattgaaattgaacgtcgcaaattattaacgcaagttcagctggcgccatttgagacaccacttttagcgagtcagtatcaagacgatgctaacctaatgggagcattggttgattttcaacagtgttacccgcagaaaatgctttaactgtcatttattttagtttaaaatatgataactaatgtttttttatacctaggaaggagtgattgatatcaaaacgcaaacaccacctcaagaattaaatcgaacagtcggctttacggccgccttatcaacagtaatggggactgttatcggcgcaggcgtcttttttaaagcatcatcagtaacagaagtcacaggttcaacggggctaacaatgttggcctggttgcttggtggtatcatcacgatttgtgcgggcttaacggctgctgaactggcagctgcgattccagaaaccggcggtatgatgcgctatattgagaaaacttatggcagtgtcgcagccttcctactaggttgggcgcaaacaacggtttatttcccggccaatattgctgcattatcaattatttttgcgacacaatgtttgaatttatttggatgggcgcctagctggcaaattccggttgcagtcattgtcgcaacgagtttaacaattatgaacttctttggaagtcgtgtgggtggctttgttcaatcctttacgactgtctttaaattaattcctttagctattattattatttttgggttaattaacccggggactaacgcaagtcacgtttcactctttactgtagcaggaacgggtacatcgaataatgtcttatcagcattgggtaatggggtattagcaacgttatttgcctatgatggctggattcatgttgggaatattgccggggaaatgcgccatcctgaaaaagatttaccaaaatcaattttgttaggtctttttggaacaatggtggtttacctcttagttaacgcagtcttcctactagtcttaccaatctcacagattgctggtaacgaaaatgccgctgccgaagtagctggtcatttattcggcggtttcggtggcaagctagtaaccatcgggatcttagtttcggtttatggtgcaattaacggttatacaatgaccgggatgcgcgtgccatatgcgatggcaactgaacaacacttaccatttagcaaacaacttagccgcttatcaaaagctggcattccaattttatgcgggattttacaattagtgattgcgatcggcatgatttttgtgggcggttttaacacattgaccgatatgttaatctttgtcatctggatattctatgtgatgacctttgctgcagtgattatcttgcgcaaacgcgaaccagaaatgaagcggccttacaaggcagtcttatatccagtagtgcccttgattgcgatttttgggggaacgtttattgtgattaacaccttattcacgcaaacgatcttagccttaatcgggttgggaatcacattgattggcttaccaatctattactacttagaaaagaaatatcatcaagcttaaataaaaaatggctaagaccttgcaaaatcgcaggtcttagccgtttttatttaagctgttttttttcgttgatacttagcgattaatgggaggatgacccctaagcccattaatgaaacggaaaccacgacgtttaagatcaattcgtgggtgtatttagaagtgcctggtgtggcatcctgtgggaagatactgaagattgtccctaatgcggtgataagcaagcaccagaaaccaacaataatcgcccaaggtttgtttttaatgtacgtatattctgatgggtatttgtcgctgttgaagcggacccgtaagaaggcgacgaagatgaagcaagtaacaaatggtgagacgataccgttgatattcaacaaccaattaaagatatcgttgatggcgggtaagaaggcacttgaagccagcacgaaagtacagatcccagtggttaaccagtaaccgttgattggtaagccttgtttgttagtctttgtgagggccttaggtaagaacttcttagcagtatcagataagaagattcgggtcccaccatcgagtaacatcgcgagttgcgcgcccatgtagatggcttgtgtaacggcgaagatgtagagcaagactttgcccatatggaattgttgacctagcgctaagaacgcgtagtaagaaccgttcatttttaaatcattaggtaagtggttggcatcaaagaagacaccaatcgcaaatgaaccgaagattgttaagaaggctgtcattaaagcgagggccatcatggctttagggaaatcttttttgccgtctttcatttcgctgacatatggtgcgactaattcggcaccgttcatggcgaaaattaaaaggccgatggttgagaagtaatgtaaatcgaatttaggaataaaagtatgccagttcattggttgtgtggcgataggggcgccgttaaataggccggcaaatgtcatgagaacgaataaaatcgtcatgataaacattgcgccacccccaacaatactgaggatttgcagtgacgctgtaaatttatgttggaagaagatgaataaaatagtgatagcggctgttaagagtgcaaatgtcgcccgtgacaacttatcttcaatattaccgttccccatgataatccagaagaaggaaacgaccattgagttggcaacatcgactaagtaaggcaaactggcaacccagtaacaccaagcagtgaggtaaccccaaacatccccactggtatggcgcatccaactggataaaccaccgccatctttactgaaagctgagcctaagtggccaaccattaattcataaggtaagacataagcgaataatagcacgatccatgagaagacaaccgccatcccttggttttgaaagttataaataatatcatcgaagccaattaccgtgacaaaatccattaaagcgaggacttgccaggtaatgtatttcttttttggttcaatttcatccattacaaaaataccccttttctgaaaatagcaatgtttctattatagtcaaagataattaggaagacaaaatttttttgatgtttcacatgaaatttttaaaaagtgaaccttacaaacttgttattttaatctagcgaattgtcattttaaaaacaggcgataagttatttaatccgatatactagttgtattaatgaaatttggaggcatttaactatggatacaccaacagttgttagcgtaaaagatgtacaaaaaacgtacggtaaagctaacgaaaaacaatatacagctttaaaaggcgtgacctttgatgtgcaacgtggcgaattcgtcggcattatgggtgcttctggttcagggaaaacaacgcttttaaatatcctatcaactttagataaaccaaccgccggtgaagtgaagattaacgatcaagaaattagccgcttaaaaggcaatgcattagctgactttagagctcaagaaatcggctttatgttccaagattttaacttacttgaaaatttaacagcttacgaaaatatggcattaccattaacgctccaaaacgtgactggtaaaaaggtccgcgaaaaaattacaacaattgccaaaacgttatcaattgatgcgattttgaataagtacccaaccgaattatcaggtggacaaaagcaacgagtggctgctgcccgggctttagtgcataatccagccattctttttggggacgaaccaactggtgcgcttgattctaagagcgcccgtgaattattggatacaatggcccaattaaacgaagaacaacgcgtttcaatcttattggtgactcatgatccattctcagcaagttattgccaacgaattctcttcatcaaagacggtcaaatcggacaagaattagtgcgtggtgacaaaacacgtgaagccttttaccaagaagttttggatacattaggaacatttaatcactaggaggaagactaaatatgctatggaaattatcattaaccggcattaaaggccggtttaaagactatttagtccttttttcgggcctaattatgtcgagtgccattttttacatgttcgaagcattagcgactaataaggattttgtgacgagtaattcaccaattggcatggcagcgattgtcttccaaattggttctgtcttactcggcattatcacactggtctacattatctacgccaatagtttcttgatgagtatgcggcgccgtgattacgggatgttcatgatgttgggtgccaaagggcgcaagattgcccaattgattgcagctgaaacgcttgtcattggaacggctgccacgttaattgggacggcgattgggatcgggttaacgcaagttgtgagccaattcttactttctcgattagacatgcatgtcaagcatttctcaccactctacttaccagcggtgattaccaccttgattttattcatcgttttattcatcattgcggcggttgttaaccaatatcaattattgaaaacacctgtcttgcaattactccatgatgatcaacaaccaaaccgcattaaggaaaataaagttacgcgcttaattcaaatcgttttaggccttgtcttcttagcggttggttattatatgatgattgcaatcgcaaaattcaaaatcatgggattagtaattgcgctaatcacgattgtattaggcacgtacttcctatttaacgcctttttcggttggttattgatgctcttaaaacgcaatgaaaagttgcgcaataaaggccttaataactttacgttagcgcaattgagtttccgaattaaggattacacaaaaatgttggctttagtggcgatgctttttgcacttgcattaggtgcgattacggtcggaattggttatcaaaatgaaattcccaagattgctgactcagcatctgcctatgacgtggtcttaaatcaaccaacacaaaaggctttgacgctgactaaaaatctcaaggggattaaacaaacggcaacctatcaagtgaaagaagatggcaaaatcgtttattaccgaatagagcagtttaagcaaacaccgctattaacgattgaatatggtaaaacgggcagtgtttcttctgaaacgaaggttcgtaaagtgccattgagcgaactccaaaaaggggataactatctcttcagatcaattcaagtaccaagtcaaacggctaaagcagttaaactcatttctaatgaggcctttgcacaaattgtagcaccaactaaggttgttaaaacttacgatgtgcaagactttagcgctaacttacctgtcattaagaagctataccaagaacaactcaaagccaatccagagttgaaggctaacccagaatctgacagcagtaagtatgccagctataagatggctaacggcattttcagtggtcttgaattcatgggcttcttcttagggattgctttcttagcaatgttagctagttgcctaatgttcaaaattttatcgggtgcggctagtgacgtgaaacgctatacgatgttggctaaaatcggtgttcgtcaaggcctcttgaagcaatcgattgccaaagaaatcggcgcattattcctattaccagggattgttggtgtcgtgcacgtcttgttcggcttacaaatgttcaaagaattaatgatcgatccatacaatcaaatttggattccattcagtattttcatcgtgttatatgccgtgtactatgtggtgacaacgtggttatatcggggcattgttttaaaagaaactaaatttggggaataaataaaaaaggcctgttaagcgcagttcaaagcgcttgacaggccttttttggattggaagaaggattgacaatcgcttatgaaagcgctatattattgatgttgaagaaaagacgcgcggtttttcttttttatttcgaattaaatgttaacgataacatgacgatgaaggagcgttaagatatgcaattattagatgatgattttctcttagacaatgacatggccaagacgttataccaagattatgcagcgcaaatgccgattatcgactttcactgccatttgaacccttcagaaatctatcaaaataagaactataccaacatcactcgcatctggttgaacgaagggacgtacggcgatcactacaagtggcgtttaatgcgtgccaacggtgttgatgaaaaatatatcaccggtgatggcgatgattatttaaaatttatcgaatgggctaagacaatcgaaaatgcctacggtaatccactttacgaatggacgcatttggaattacgtcgctttttccacatcgatgaacgtttaacagcggaatcagcaccccgtatctgggaaaaggctaaccaactcttacaaacagacgacttcaaaccacgtcaattgataaaaaattcaaatgtacaagtggtctgcacaactgatgatcctgcttctgacttacactaccatcagttattaaaaccggaagaagctgccaacggctttaagacgttaccagcaatgcgccctgatcaattgatgcaaattgatcgtgacggttttggtggttacttgaagacccttggaaaagtagctggggttgagattcatgattttgcaacgattgtaacagctttgacgcaacggttcgaatttttcaacgaaatgggcgggcgcttatcggatcattcgctattgacttaccattttgaagaagcgactcaagcggaattggatgcgattgttgctaaagggattaataacgctgcactcagtgaacacgaaattaaccaatatttgacaatgttgttagaagcattgatgaaactcaatacgcaattcaactggacgatgcaattccatatcaattctgatcgtgatttaaaccgcccaatgttcgctaaaattggtcctgacacgggttatgatgctgtcgggacacaacctgacattgttaaacatatcagcgcactctacacgaagatgcaacaaactgaagacgtgcctaagtcaattttctactcactaaacagtaatgattggttagaattggcaaccatgatgggctgtttccagggtgggacaacgcaaaaattacaattaggcgccggctggtggttcaatgataccgccgaaggaatgacccaacagttacaagtcttcgcactacagagcctcttaccacactttgttgggatgttgacggattcccggagtttcctatcatatccacgccacgaatacttcagacgtgttttatgtagcttctatggccgcttggtagaacaaggtcgtgtgccaaacgatgctgcagaattagggcgtgttgttcaaaatattgcctataataatgcgcacgattatttcgactttttttaaaataaatgaaagaagcctgcgatgaattatcgcggcttcttttttatattcagcgtgcgcaatgatttctggtacaatgttctaagagcgtacagaaaggaagcatgcggcgtgaaaaaggctgataagacaaccgtcacgattcgaacgattgcacaacttgcaaacgtctcgcatatgacggtttcacgagcactgaatgatagtgagctggtaaaaccagccacgaaggagaaaattttagcgatcgccaaggagatcggctatgtgcctaatattaacgcgaagagtctagtgacaaatcggtcttatatgattgggattttctttaccaaccttgaaacagggacttctaatagctttatgacggatgttgtggcccaagcgcaagcggtattgcccaagagttattcgctttcgattaatagtgtcgccaaagcgatggcagggcagtatatttcaattaataactacgacgggattatcgttattagtcagtctaaatctgattatgattttattgaatatgtgcataatctgggtttaccgttagttgttttgaacagggtgattgagcggaatgatattaataattatgcgattggcgatcgattaggtggggagttggccactaattatgcgattcaaatgggccaccgtaagctagcgttgatccggggcgttgattcgttcgaatcatccgtccagcggactaatgggttcatgcaagctgttgaggcgaatggcattgcagttgacccgacactaattaaagtcggcgattaccgaccagagagtggccatgaattgatgcgggagattctggcgagtggtaatattccgtcctgtgttatttgtgagaatgatgatatggcggttggtgcgattagcgcctgtgttgaacttggttatcagattccacgcgatatctcatttatcgggtttgatgatatggcatatgccaaatttattacgccgtcattgacgacaattaaaaaaccgactgcccaaatcatcgaaatgggtgtcgctaaattaatggcgattgttgaaggcgagcaatcagacgttgaacaaaaaattgttgatccagaaatggtcatcagacaatcagtcgttaatttatatcaacactaataaaagaagcgctgaaaaccaaattggtcttcagcgcttcttttgatattttaaagggttaattcattataactttgaacagtgacgccttcatcagtgaggaccacttttgtgatactgccgttcattgggctgaccgtcacgtcaaattgaccattgccaaatttaccgacgatactgcgaatggttgtgccatgactgaccatcaagacattgtcgccatctgaacattctgagcggatttgtttgaagcctttaccaacgcgggcccaatattcggccgcattttcggcgtcgttaaaaggatcagcttctttcatgaagtcttttgaagcatcgagtgagtacttcgtaatgatttctttgaaagttttagcgtcgtggctagcgccagtcatgtaccaagctttcgctgaatcttcaccttcatagtaaccgtagaattcttcgcggaaatgaggggtgattgtatagggtgtgtcgaggtagaaactctttttaagaataatcttagccgtatccatcgcgcgactgcgatcacttgagtaagcctgggcgaagttaacctttgaaagttgtttgccggctagttcagcgtctgcgatgcctttttcggtaaggggtgaatcggaccagccttgcatccggttgtagcggttgaagaaagtttgtccgtgacgaactaagtagagtgtaatgcgtttcatgtaatgacctccatcgaaagttttaattaattctattctagcatagatagcgcttcattttcacatgaaacaaagttatctctaatatcaggattattaatttaacgaatgagcgtatatctttaaaagttggaatatatatgataacttattactaatattgtattttacaaaagtatatttttaacaacattaataaaaagggatgattttgaatggcaaacaaagtaagcactgcaatcagtgtagatcagtttaatgaatggtaccttaaaattggtcaaatctatcataaaattaatcatattacggtaagccatgatcttagttacgaccaatatttgattatgcgagaactaaagcgaatccctagtattgaagtgacaaagctgtcccggatgtttgatattacgagtccggcgatttcgcgcaaggtcaatgtcctctataaaaagaaattgattactaaaaagcggagcgatattgaagatcaacggaaagtttttatttgtctaacaccattaggtgaacagttaattgaagagctggaagatgattttgaagctttatttaaagaaatgattggcgaaattaatcaggaactaatgccgcttttcaaaagtacggattgtttttataactacctttcaaaaaaagcacagcaacaagcctaatttaaaaagtaaaaagcacctaagctatgatgaaaatccgctaggcaatgactgcgggggattatcaccaaatcctaggtgcttttttgggtgttaatgctcagaagctatccgtttcaaacgcactttaaacgtgcttctcgaactaccttttccggttaactaaaaaatggtaatgatggttgaaaaacaccatcattaccatttttctgttaatcctcaaagccaaaacgttcgagttagcactctaaacgtgcttcctggcgtaataatttccgcttaatctaaaaatcccattaatcctaaaaccggattaatgggatttttgtattaatgctcaattactaagcacgccagtcagcactctagtctttgaagttgccactttctacgtccttgatgaatgtcttcaagtggtcgaagtatactggggcgttatcaatcatatgatgatgaccaccatttggtgttgtcaccaaacgtgaatgtggaatcttttcagccatgatcttagcggttgcgattggcattgtttcgtgttcgccaaatgtgattaatgttgggacagtaatcttgtggagttggtcacggaagtgccagtccttcaatttaccagtcacaacgaattcgttgtcgccttggaagacgccgtaaacgtctgttgccattgttgggattaaatgtgagatagctaatggttgtttgcgatcaacgtaaccagcgtttaacttgtcaacaagtgcttggtattcgtcgttatcgtaatcgtttttagcttcacagtcttgcatgaattttaattgttcaggcgtcatgatgtcttcgcgaattttgttgatgttggttacatattcgtcgatttcatcaaccatgcttgaaatgatggcacccttcaagtgttggccgtatttagcagcgtacatttgaactaatgcgccaccccatgattggccgattaagtagaagttgtcgatgccgagtttttgacggacttcttcaacttcgtctaggaagtagtcgtaagttaataattggtcattgcctggttttgagtaatcaggttgatcagaataaaatgaaccaagttggtcgtacatgtgtacttgcacaccaagatcagctaattccttaccgaagttttcccagtattcgtggttgccaccagggcccccgtgtaagcaaagtaagtgaatatcgcctgttccttgcgtgttcgtccacaaatgataaccattatccaatgtgaggatcgttgttccttgtttcatatctgcaccatcctttaattatgatagtttcattataaacctattaaaggaaatgtgcgagtattaacaaggattagttgcgggtttctaattgctgtctaatcgctggtacagcttttttgttaccggttaatatcaagtgatcgttcaagtgaatttgcgtgtcaccatgtggcataatcagttcctgattgcggtaaattcggctaatggtaacttggtccacaaatggcaagttggaaatctgtaagccggtgaagcgtcggttttgaacggtcacttcgaagaggccggcatcggtattatcgatgatttgaagggtcgagggggtttcaatcaggcttcggagtaagctgatattggcttcgtaagtattgaagacttcaacaccttgttccttaagttgatcgtatttttcatctaagatatcctttgcttcaaatcgggcgataatccggggaaccttagcgtcaagtgctagttgggcgaggcgataattttgttcgtggttcagataaccgaggatgataatatcggcatcaaaagcaccggatgtcacaaggctgtcttcactgagatctggtagtaaggtcaggtcagcggcactgtggtagatttcgtaattaccttggttatcagtgaagagttgtgtggtataaagcccgtttgatagttgttgggcaatgggaatcgtcataatgttggcgccgataaacttaacgcgtttgcgcggtaaatcttcaggagttggctgatagaagcgattgaataggattggaccgaggatacaacttaaaatggcagccaaggtgaaggccccggattgttgttcggtaatggtttttaagtttagacccaccgttaaaatgggtaagaccaacgtaattgttgtcgcacttaaaaaagtacccgcaatcgcattagtttgtttaaagcgccgttttaaaacccaataggtagctgctttggagagcataaaaccgatgaagaaaaagggaattaacgacaacgatttacgatccgctaagagtgctggcaggtccaatttagcacccgtcatgatgaaaaagattgggatgaaaaagccgtaaccgatggaggttaacttatcggttgtttcttcgcgtggccgtaataatttcatgaccattccggctaagaaggcccctaaaatactttcggcgccgacttcttcagcaattgacacgagtgtaatgattaagaagaaagccaaacggatgtcgagttgcgtggtggatttatcaatccgggcgaagaaatgatagacgcctttgaagcggactaacaaataaatcgcagcaacgaaaattaatgataggagccagagacttttcgaaccggggttattgagggatgaataaaccgtcaatgcgaccaacggaataatttcgcccaacaccgcaatcaagagaatcgtttggccgagtggttggctaagcagttccttttccttgagcgcggcaattacgacaccgagggcaatcgttgaaaagaggatggttgccagaccaatatctttaaagaaaccactccaagcgagcaagccacttaagccaaatgagatcagtaagataaaggcaaaactggtaatcgctaatctgacaggactcggttggacttttagttggggatcagttggtgtgggttgttttttaaagaggtcaaaatcgatttccatcccacttaagaaaatcaaaacggtcacgcccagcgttgagagttccgttaaagtcggggtggagacgattaaatggaagccactcgtccctaaaataatgccgacgataatttcggcgacggcggtgggcagataggacattttaaatttagccatcagaagcggtgtcattaaagccgctaataaaacgatgacaagtgcaaggttagtcatgactaacatcctttcgaaatacaaagttgtttaagaggatacactagatactttaaaaattaaaggtcaatttacaattcgactaaacttggttagtatggaaggaataaaaacaagaagaggtcaggtcacgattatgaaaataaaagagagtttagccgttggcagctttgcctttttcggtggtatcttgcgttatttaatcggattggtattgaatcagccaactgggtttccgtatgggactttgtgcgtcaatttgattggggcgttttgcctaccatttttgatgcgctatatcgtggcacgcttacatttgagtgaccaattagccttggcaattgggactggctttttcggtgctttcacaacgttttcgagctttagtgttgatgccattcgattggtaaatcagcaacaatggtcagcctttgcttggtatgtcgggatcagcatggtcgggggcgtcttgttgagtttactagcggattactgggcggttaaattgacacacaaccctgaagaacaggaggtctcacaatgactattttattagttggtttgggggcagcgttgggggccattttgcggtatcaattgacgcgaattgggaatcacatcgctagtgaattcccactgatgacctttttaatcaatctaaccgggagcttttgtctgggctggttgaccgcatctcaattaagtcagccggtgacgctctttttaggcgtcggtgtgcttggcgggtatacgaccttttcaaccttaaatagtgagttgagccaattgtggttccgacgccggtatcacatcttctttggttattggcttttgacctatggcctggggcttttggtggctgcagccggcttttatgctggtttatagctgacaatagccagtaggccgattgactcgcactcatgtgaattaagtgttaaactggtagggctatttatttaaaatagggaggcatttgctttgactgacgtacagaaatcattggaacaaagccgattaacagaaattattggtttaattaaaaaagctgagacccattttgaaggggctgttaagcgcgcaaaatcggaagaaaaagaaattaacgagaacttcttcaacgacgttcgccttaacttcaataacgattccgcgatgactgaaaccgccgtttcgattgaacagcagcggcaaatgctacaagaacgcaatcactcgtggcaacaatcttcacggcaattggaaaccttgcaaaagatggaaaagacgccatactttgcccgtgttgattttcaagaaaagggtgaacctaaatccgaatcaatttatatcgggttaggctcatttacagataccgacgatcatttcttaatttatgattggcgggcaccaatttcatcaatttactatgaaggtaagacgggcgctgtgacgtaccaaacaccagacggtccgcaagatgtgaatatctcacttaagcgtcaatttttgattgaagatggccaaattaaggccttatttgatacgcaagaaacgattggcgatcaaatgttattagaagtgttaggtgaaaaatctgatacacagatgaagagtatcgtgacgacgattcaacgtgaacaaaatcagattatccgtaataccgatgctgatttgttattcgttcaaggggcagctggctcagggaaaacgtcagctatcttgcaacgcattgcgtttttactctatcgctatcgggggaatttagattcgagccaagtgatcatgttctcgcctaaccaattattcaacgactacatcgcagatgtgttgcctgaattgggcgaacaaaatatgattcaaatgacttacttccaatatgtggcacgccggttaccaaacatggcggtccagagcctctttgatcaattcgaaacaccagttaacgaaaccgatggccggattagtcgcttgaaagaaagtctcgtcttttataaggctgttaaaaagtacgctgcacatcttgaaaaagccgacatgcgcttccgcgatatgaaggtcaagggccgcgtcttaattactaaggaacacatcagcgaggtttattaccggtttaatgaaaactaccatctcggcaatcgattagatgccactaaagaaagtttgttgcggacattgagccacaaggttgatcacgaaaccaaggccgactgggtgactgaacaagccgagaatatgagtgatgaagaaattcgcgaattgatgtctggtaaagatttcaagacgggcgatgctgaaagcaagtttattgctaagcagatcgtgctagaagcgttcaaacccgttcgccggtctattcaacgcaatcgcttcttaagcatccaggcgcaatatattcacttcttacgggttgtgccacaacttgtgaagttagccgattttgatattacagaagagcaatggcaagaccacgtcacgcattttgtcgcacaattgaaggctaagcagatgacgttgcaagatgtcacaccttatcttcacctctacgatttgatgacgggtaaaaaaggtgaacgtgatatgcgttttgtcttcatcgatgaaattcaagattacacgccttatgaattggccttcttgaagctccacttccctaaggcgcgcttcacattattgggcgatttgaaccaagcgattttcactaagggtaacagcacaaatctcttgcaacaagtgcaacaattatttgatgcccaaaatacaaaagtggtgcaattaacgcgttcatatcggtcaacgcaacaagtgaccgactttaccaagggcttattaaaaggtggccaagccatcgaagccttcaaccgagttggcgataaaccaaacttgattgtgcgccaatcagaagctgagttagtggctgatgttaaccgccaattagccgcaaatgaagcggatgaattatcgacggcgattattaccaagacattggtgcaagcccaagaattgacgaagatgctcaaggaaacgggaaccaaagtcaccttgattcgttccgaaaaccaacgtttagcagccgggacattagtggtcccaagtttcttagctaaaggtttggaattcgatgccattattggctggcaaatcagtgccgccaactacaatcatgaagatcaacggcaattgctctacacgatttgttcaagagcaatgcatcgcttgaccttgttagccactgacgcactctcaccactgattgataacgtcgatccagaaaaatatacattaacaaaataatacgactagagggactcatcaaattgcttggtgagtgcctttttttgtgttaattatggtaaaatgtaaccgtttagcagttagttaagccctgggaggattaaagcatgaaaaacgagatgaactattatgaaatctcgcgagaagaatggcgttattttcacggccgtggcgaaaaatacaccgccattacggacgatgaattacagcaagtcagcggcttaaacgaccgcatctcgttaacggatgtcagtgacatttacgtgccactccgtcatttattacaaatgaagtatgaacaattccaagaaaatcaaattaagcagtctgaatttttagaaatcaaaccgcataaaaccccgttcattattggcatcgccggtagtgtcgcggttggtaagagtaccaccgcacgcctattacagctattactgagtcgggtctatccagataagacggttcaaatgattacgaccgatggctttttatattcaacctctgaattgaagcaaaaagggattctcgataaaaaagggttccccgaaagttatgatatgccgcagttgatcagcttcttgaatgctgtgaaaaataacgtggcgccggttaaagcgcccaagtattcgcatcaaatctacgacattattccggatgagtttgatatcatcgatgaccccgatattttaatcgtcgaagggatcaacgttttacaattaccgacaactgaacaaatttacgtcagtgatttcttcgacttttcagtttacgtggatgccaatccaagtttaattgagaagtggttcctagaacgatttgacctcttattagatctcgcaaaggatgacccaacgaactattattatccttatgcgattagtgatcgcgccagcgcctttaagatggcccggcgtgtctggcgtgacatcgatttacgtaatttgaacgactatattttaccaacaagaaaccgcgccgatttaattttgcataaaaccaaacatcacctgattgataaggtatttctacgaaaatattgatagtagaatgagttttttcacaggaatggctgtcatccattgacgttttcatgattaatcagtagaatagatacattataaaaaagttttagcgttactaatcgagctgagtgaaacgaggaccatttaagttttactcagctttaataaaaaaggagtgagttgtttggcccaaaaggacatgcaagatttcgataagattatcgttttagattacggtagtcagtataatcaattgattacacgtcgtatccgtgaattcgggattttctctgaattgttgcctaacacgacaacagcagcgcaaatcaagaagatcgcccctaaaggaattattttctctggcggcccaatgagtgtttacgatgatggtgccttttcagttgaccccgaaatttttgaattagggattccaattctcggtatttgttacgggatgcagttgatcagtttcaaaaatggcggtaatgttgaagcatcaacagaacgtgaatatggtaaggctgaaattacagtgactgacaaagacagtgacttattcaaaggtcttcctgaaaaacaaacagtatggatgagtcatggtgataaagtgactgcaattccagaaggttatgtgacagttgctgaaagtgataacacaccatttacagcaattgaaaaccgcgacaaacatatttacgggattcaattccatactgaagtgcaaaacactgaattcgggaacgatattttgaagaactttgcatttggtgtctgtggtgcccaagataactggacaatgaacgactttatcgacatgcaaatcgctaagattcgtgaacaagtcggtgacaagaaagtccttcttggtctttcaggtggcgttgattcatctgttgttggtgtgttattacaccgcgcaatcggcgaccaattggtcagcatctttgttgaccacggcttactcagaaaaggcgaagttgaacaagtgatggaaagtcttggcggtaaatttgggttgaacatcatccaagttgacgctaaagaacgtttcatgagcaaactcgctggcgtttctgatccagaaaagaaacggaagattattggtaacgaatttatccaagtgtttgacgaagaagcaactaagttaaacgggattgacttcttagcgcaagggactttatacactgacattattgaaagtggtacaagtactgcgacaaccatcaaatcacatcataacgttggtggtttaccagaagacatgcaatttagcttaattgaacctttaaatacattatttaaagatgaagttcgtgaccttggcgaaaaattaggcatgccatatgaactcgtatggcgccaaccattcccaggtcctggccttggtattcgtgtccttggcgaagtgactgaagataaattgaagattgtccgcgatagtgatttaattctgcgtgaagaatttgcactcgccggtttagataaaaccgtatggcaatacttcacagtcttaccaggcatccgtagtgtgggtgtcatgggtgatggccggacatacgactacacagttggtatccgtgctgttaactcaatcgacggcatgacagccgatttctcacggattccatgggatatcttgcaaaaggtttctgtgcgaatcgttaacgaagtcgatcacgtcaaccgtatcgtgtacgatatcacgagcaagccaccttcaacagtggaatgggaatagattcccaattaaaaacaccgcaagttgtttcgacaacttgcggtgtttttttgtgcaatcaatttagtcttttaacgtcagttctttgaaatcaggcgtaatattaaggtaccatctaattaatcttaatgatctatatttttgtcgcgattcaaaatcaggccttgatgataggggtctacgtcacttacggtgcggggatgattttagcccaagttattcgaaagagcgtacaaaggcacttttcgaagttatcagatttaaaagtccaactgttgggttttgtggtgggggcttggttgatgattacgccgcatctaattttattaggcatcttattgattagtttctttggcagtgccaacagcattcttttgaatcaccgcgcttattacaccggcgtcacaacgcccgcacaaaccttaatcgttaaatatcggaatacgtatctcggtagtatcctcatgcaatttatcttgattattggcttgatgggcctagccgtaatgcggcaacaagacatgacgaccgtgattgcccaaatcagtggcagtgtcgcaatgtcggacaccaccagccagttgattcacttggctggtctgattagcgttggcttcttaacgctgattgccggattggcaggcagatatttaccagcgatggatgaaaatccgctaacttaatgaataaaaataacggtccctttaaaggaaccgttatttatttgagcattgtattcgtcataaattggaggacgatgctaagttatttagataaattaaataatcaaggtatcaaataacatataatcgataaagttccgctaaaaactttagtaaaataagataaaattttttcggaattttactttggtttatggaaatggaagtattaaagatacgcatgaaattgaattatatacataaggatattatgattgaatgtcttaagttttgaggctcatctaaaaaggataaggtgtagttattatttatcagtagttttttggtaataaatttaaagatcacggatatatagtttgaatagtagctagttttaagtagaatacatgttataatagggtattaataaaatgtgctgtgacacatgaattaaatacccttaaaaggaggaaatatgttagagttattatcaataagtgaatgtgcaaaaaaattgcgatcttcagttcaatttataagaaaccaaattaatgaaggtaccttgatagcagagaaagttggtgggagttgggtaatctctgatcaaaacttgaataggtggatagaagaaaatgattatattattgaaccggaagaccatgtacgattaacagatgatgtacctgataaaatagcattcagtttttttacaggagcagggggactggatattggaatggctcaggcgggtattcatcctatacttgttagcgatattgataaacatgcacgtaagtctatatcacaaaactaccccaattcagctctgattggagacgtaacagagtatgatgcggaaaaaatatacaggtatgctaaaattccgagagatagacaggtcgattatatgtttggggggcccccatgccaagccttttcaacagctggaaagagacgtggatatggtgatgttcgaggagacgtatttattaaatatctagatctaataggagaaattaaacccaaatatgcagttattgaaaatgttagaggattattgtcaatacccgctatttttgattctttagatgataaaggtattaaaggtggagtattactatatgctattcaaaaattacgaagttttggatatactgtttcgtttgatttgtataattcggcgaattttggggctgcagaaacacgtgagcgtgtaataattattgcaaaacttggggctgaaaaagttgattatttagagcctcaaaatagtatgattgacgaatataatctgccgaaatggcgtacttttggcgatgtagtaaatgatatagaggattcccctcaacactatattgattatccagaaaaaagaagaaagtttattaaacatattccagaaggtggaaattggagaagtttatcagaagatatgcaacgggaagcgatggggaaatcttatgaactttcgggtggaaagacaggattttacagacgattatctttcagtaaaccagcacccactttggtaactcatccaacaatgccggcaacagatttaattcatccaattgagaatagaccacttagcgttgaggaatatgctcgagttcaaggatttccggacgattgggtaatagaaggatcgttgttagataaatataaacagataggcaatgcagtaccagttcccctcgcgaaagcaattggggatagaattattcaagatgaaaagggtgagagattgccactacaatttaaagaatttaagaattctcggtacaaggatactagagacactctatgggaaaagaaattgttgaaagaattaggggaaagtgtcgaacaagctaaagataaggtatattcattgagtaaccaactgtcgttattttaaccgcgtataacatctggattttctgaaacgacattctttagataattttgataactattttcagacgttaactcttgatttaatcccattaatagatttagattttcccacataaaggcaggaataggttttccactttttcgaagagtttttaatcgaaaccatttttgaatttgtgttccattacgaatagctgaactagagctattttcagtattgtctctatttttaatttgaacaaatgttgtaataatagtactaggttttacaaaatcgcaggcacgaagagtttcaccacgagcccaaatccagccttgtggttcaacaatacttgcaatatattcttcaagaagactaccctgaatattttcagcgctcataaatagctgatgggcgctaatttttttttgtatcgcattttcagacaagtgttggcgctcttgcaccattacaccgagtgctggatcgatagcgcttccaggtagtttagcagctcttttacttggaggtgtttgataggcgttagcgtattttgatacccatttcctaatatagtcctttggatctgtagaggattgttttacccctgcatttgggaaaagggtattcatatcgcttaaagcaatagtgaatagtgtagtgatgtgctcgtattgtggagaggatataggaaaaatagtaataaattctggttcggttagtacttcaattaagtgttgttggaattgtggaattgtagtcccaacgtagtcagatgggcgtttagagtttgccataagttcacctctgtaaagtttatttatactgtctatagtaacactactttaaagaattttaatgataaaatcagtaaagaatgtttagcatgcgaagctactatatagtaatgataaatatatttaaagtagttcaaacgtcgagatagagtatatgctcgtttaaaagttaattcaaattttgaattaactttctttttttcattaacagtctaattagactatactataaaaatcagttcaggaggatttttatgatgaagtcaattttattagtcggccagtcaaatatggctgggcggggatttattcaagatgtgccggtattgcggcacgagcgcgtgaagatgttgcgcaatggacgctggcaaatgatggctgaaccaattcattttgatcgtgaggttgcgggtgttgggccggctacatcatttgcggcggcttgggtccaggcgcacccggatgaagaattaggtctaattccgtgtgctgaagggggcagttcaatcgatgagtgggcgagtgacgaagtgttgatgcgccacgcgattgctgaagccaaattcgcacaggaatttagcgagttaattggtgtcttatggcaccaaggggaaagtgacagtctaaaaggcggttatcaaacatatgctgccaagttaacagcggtctttagtcatttacgccaagcattgggtcaagcaaacttacccattattgtcgggcaattaccagattttttaggccaagaagggttcggcgctagtgcgacagaattcaatgacattaatcgggaaatggcgaacgtggttgcgcaagatccccatagttatttagtcaacgccgccgaattaacggccaaccctgatggcattcatatcgatgcggcctcacaacggcgctttggcctgcgttattacgctgcttttgccaaccaagaggatgtcctcacagtactaccagatgaagctattcaattagaagcactttatcaacgaccagaaaccccgcaggaaaagatgtatcgcttgagccgtgcttttgcacttggccaaatgagctatccagaattcatcgcgcagttaacgggtgaggggactgccaaatgattcagtttctaattttgggtttattgaagaaaaagccaggtgcttatggctacgaattattagctgatatggaaaacaattatttcgaattctttttgaactttacgaagggttctttttactacaacttacaacaactagcggaaaagcaattgattgaaaaaatagtggatgatgccagtgataagcgcgagaaaaatcgctatgtgctgactgcggggggagaagcggcttttgaaaaacagttcgcccattatggcgggcagaataagccgattactttcccattctacacaccactactattcactgatcaagttgaaccaacgcaaatgcgcgaactcttgcagagccaaattgcacaaactaaggaaaaaatccaagcgattgaagcggcattaaataccgcaaccaatctacaaccgatgtttatcaaaatgatggccaactcaaaacgacaccacgaagttaatttggagtggctgcaagaacaactagcagaggggatacaatgaagagaatagttgatttagtaattaccattatagttttactactatttggcgtgcttatttttagatttgtgacggattttaaaaagacgctattactagtaactgtgttagcaattgcgattattttgaagcattatatccgtaaaaaataagttgtcgtaatctcttttaacaaaaaaagtctgtcataaatttagtgggatactaaatgatgacagactttttttaataggcttgcataaataaactaactgctagtcctagtgcggcgatgccaatcccaattttagttaggcgttctggtagtagacggacgatgattgggccaatgaggccgccaatcaaaaagccgattccaaggggcaagacaaggccccaattgatggtcgtttgaagcgcgtagactagtgttgcgatacagttcgcgaggcccatcgttagatgtttggtggcgttatattcttggaaaggcgcttggctgatgactgagagcaatgaatagcatcaagacaccagaagcagcaccgaagtagccgctgtaaatgccgactaagaaaacaccgagccaagcgaggctaacttgccatttagcgggttgaccaacttggagatggcgtggtaagaggattaaaatgccggcagataaaatgaaaaaggggacaattttttggaatgtttctgctggaattttaaagagtaataaggcccccacaatacagccaattaaggttaacggtaaaagcgtgatgagttcccgtttttggtgtttcaattccttgcgtgaagccagtgatgcgccaacgccggtgaagattaagcccgcggtgttggtgacattggccgtgaccggtggtaacccgagtgcgagtagggctgggtatgaaacgagtgatgcgagaccgccgacggtactaacgatgccggctgccacgccaatcagaattaatgtaaaactcaattggataaatgacatgaataaggggctcttttctataacgaattaacgttttaatattataggacttgatcgtagtaacggtaggcgcaatattcaacgggatacttgagtgcgtagatgtaaaaagcatcgctgacagcgtcactgatggtcatcatttcactaccaccatcagttagtaagaaataagtcatggccagtgccagtaaaataacgattgaatcaagaaaaatagccatcaccttagcggctttgatggtgattaattgccagcgttcatcgttctggtaggcccgcgacttattgtgtttgaagcgaagatctaaaaagatgaaaactgctaacagaacaatcagaattaacatgatgaattgcttcattttgaatcctcctctggtgaaaagacagttgttatttcggccccaaagacctgcgcaatcttaaaagcgagttctaatgagggtgtatatttatacttttcgattgaaatcacggcttgcctagaaatgccggttcgttcggcgaggtcagcctgggtccagttgcgctcagcgcgtaagactttaatgcgattttgaatcacgtaacgaactccttccataatgtaatgaactagttactttcaaattgtaatgagttgatgacattttgtcaattttattttgaaagttaacgcgattgtggttggaggattagtggtttaaaatagggggtagttagaaaatgataggctgaagggttggttggcagatgataaaattaatcacttttgattgttatgggacgttggttgatacggcaccattttatgaggctgcgggagaaattggcgtgcagcatcagattgatcgcggactttttcaaaaagcttttgagctgtatgaagatcgaatgatgtatggcgaatatttcatgccttacgaacaggtcatcgaacaagccttgcggtattgtgcgcatgatttcaattatgagtacgagaatgcagatttaacgcaaatgttaacggtgcaggctaatttaaaagttttcccagaagtcatcgattttttgaaaacaatgaaggctaaggggattcaattaggaattatgacggatgcttcgttaccaattctcaagcagaatttggcgcaaatcccagttgaatttgattatttatacacctctgatcaattaaactgttataaaccaacgcttaatttctttggccaagttgctgatcaattaatggtgactaacgaggagcatttgcatattgctgccggttattggtgggatatcattccttgtcagcgcctgaattggcaacggatttgggttaaccgcaagcaagcccaggctttaccaacaaccgtaatgcaacatgaagtggcagatttaacagctgcaattgatttaatttaaacaataaaagaaccgtcttgaatgccaatattaggcacgcaagacggttcttttatttatttaacataatatctaaaatcacagggtctgtttcccgaaggccttctgtgcctaaacgtccgatgccgtgaattgtctcatcgattgttgggcagacaatgccgttactatttggaataacaattccttgcaaggcgaggttaacgccgcggtacattgaggaaacggcggtggcgactttcatggcacaagcacagccggccccgtcgcagatcatcccggccgcgtcgccagccatgttttgaatcgcatgacaagcatcttcgtaagttccgtcatagagataaaccacaccagccgcggcccccattgcggccgaatcagtcgcgcaaaaggcggataagacgggcaaaaatgagtgaatgtatagggcggtgagatgggataatgtttgtgcccgaatcagctgttcctcagtcgcctgaacggcatctgccgctacgctgaccggaatggtagctgtgatgccttgattaccggaaccagagttggacatcgcaggtaattgcgcaccacccatgcgcgcatcggaagccgctgccgcgtaagcaatcatccgattaccaagatcgttttcagtgccagaaccaaagtgattacgtttggcaccattaattgattggccgagttgaagaccatagtcgtgcgtaaagccatcttgggcaagcgctaaattaagggtgtgcgcctctttcatgaaacgaaggtgttccaatggttcgttcatggcaaaatcccaaacagccttaaagttcatagtttgtaaaaattgttttgattcagagctcgcgtgcgccgcgggacgggggtggtcaattaaaatttggttatctttttttaaagaaaagatattggtatggctgccagcaatcgcaacggtgaccgtattttcaagatctttaatggtcacttcaacatataaatcgtcagggacaagtgctgttttagcagtcactttaccagaatgagcgaggtctagaatggttggtaagtctgtagcgcgaaggccttcaataacgctgaggccaaccgtcgcgtcaccagcaattgcccccgcggccgcagcaactaataaaccaggttcgccagtaccagggaccataaccgctagggcatttttcatcacgtttggtgaaacgtgcacctcaatggcttgaatctcgcgattagtcagttgggccatacaagttgcggccccaaaggcaacggcaattggttcagtacaaccggtagcgggcacgacaccatttttgagggcttgaatgaaatgttttgattgtaaagacataataatcactccttatttattttttaaatgaatgctaagaacggtgaaatcatcagtagaataccggtaaaaacgatgagatataggctaggacccttgagcttattgagagcgggaacacgatagacaagatagacggggattaaacaaccaatcattccgaaaattggtgaacataatgatgtaaaacttaaaacgggagcatttagtaagattgcgctccaagaaactaggatagcgaagattaaaataccgaagctaaggttctttttgttaatcttatgctttggcataatccgatgtaaaatattaacggcaattccctgacaggcttcatggaatccaagaaagacaccaaagaaggccgtcataacagcgaaaatatttaaaatgaaactgagaattttaattgaattaccgttcatattctgagcagcaatggcgagtgtcgagatgttcttctcgtaagcttcaactgcttggtcatgacctaaagcaagattgaatgaaatggcatagaagaagacaacgaaaaatagtgtgaaaaaggcaatattcatggcacgaattgatttatagcgtgctacttcaatatttttattgtgggatctaaacgaaataaccattggtgataaggattggaggaataaaatagaagtgagtgtgaaaggaagcaagatgattgtttgtttaattaagtaacctaaatcgggaaatgctgcaacatttctaagatcccaatgttggatcatcacaacgccgaggacaaagacaatgattagtttcgtacaaaccataaaggatgaaattttgaaaagtaatttttcggcacgagaagcaattgcgacgagcaaacaaataacaatcaacccataaaatggattatttgaccagactgttttagtaacatggaaggaatgtaaaaatgaagcgctatcatttgtaatcgcagtggaataaacaaatacccagattagtagcattaaaaagtagagaacacctagtaggaagccccaatttttacccaaataaccactgataacactaggatagtcttcgcatttttcagattcggctaaggtattgatgaataatttttggaataaatacatagcaggataagcaatcacagctgaaaccaggaagacccagaggccaactaaaccgactttaacaggtaaaaaaacaatgccggcaccgattgccataccaatactcataaaaacccagccccagtctgtgccgtcaaacttagtggccgcctgccattccgttaaagacatgcctgccttatcagcatgtttttgagatctcgaaagatgtggtgttgattgtgtagttgtttccaaattgctcactccttcattaattttgaatttaataaatagttagtgattatttagaatagtgtcgccacttcttgaaggtaacagaaacaacactgatattaagcttatcaagaattaataaccgatttttaatcatgtataatcatcctctcaagtattataaacaaagtatacaactgagcaatacgttttacaataataatttattattataataaatgtttgtaatctatcaagaaattaagtattataaaggatactaagaacaacgctattgtgaatggaggatggttctgatggttagcgaattagagagatatcaaggattagttcattttttaggtcaagttttaggtagtaattatgaagttgttttacactggattaatcaagatgattcgtactatattgcagcgattgagaatgctgaaattagcggacgtaatttaaattctccaatcactggtttcgcgttagatcttattaggaataaaatatatcaaaaacaagatgctgtggttaattacaaggctagtagtgataaaaaccagcaaattcaagggtctacttacttcattaaggatgatcagggtgttttgttgggattgttatgtattaattttaatgcgcaaccatatttagcggcggttgataatcttattaatcttgctaatctggattcgttaatggcatcagtacctacagtggctagcgaacatcaacagcaacgccaagtcgttacaaatgaagaagtgctccattcgagtgttgaagaaatcatttatgcggtagtagcacccaatacactgcagccaggtattaagttaacgcaggataagaaaattgaaatttgtcgaaaattaaatgaaaaaggtatttttaaaattaaaggtgctttatcaaaagttgctgagatattaggcacctcggaaccaagtatctatcgatatttaaaattaattaatcagtcataaatacaaaatagcgccaccgatattttcggtgacgctatttttaacattatactttttaaaccgtcaatatctctcgaatgccttcttcaaacgatgtaattttaaattcagggaagcgagttttgaatttatccgaaacgaagatgttgtcggcttgataacgggggagcagctcttgtagttcgcgactattttgattgaagaaacttgctaatttgaattgccacattttaataatcgaataggatataggttggtacgtgatttcttgaatcagttcaactaaacccttgtaagtaatgctatcggcacaaggaaggtgccatgtttgaccgtaagcatcaggggtgttgccaattaaagccatggcgcggctagcatctggtgtccaaattaacgtgcgcaagaattgatcactaacgggaatacgtgctttttgcccggctttgattttgttgaaaagaagtgtattggtaatactattggttttggcgggaccgtaaaattcaggggcgcggcaaataacagtctctatttgacctgcttgcatagcatcgataacggtttgtgccatttctgcccgagcggttgccttttgaccgtctggttggaagggactgttttcggtttgcggtgtcgcatttttagcgtacatataagtgttatcgaagaaaactaatttactgtggttgatttgacaggcgcgaatcacattattaatcataatcggaaattgaacggtccacatatcagaattcataggtaaaccggctgtgaaatagacaatttcgctccctgcgacggcctgattggtttcttcaaaattgagcagattagcgggggagagttgatcttcaggattaaccttccgcgggttacggctcacaagtcggatgtcgtgagtatagtttttgtagagttcttttgcgagttcttggccgatttgaccgctactgcctaaaattgtttgcataattaacgctccttatttggtgtgggtggtcataatttgggtgactttatcgagaaattgcttgagttttacaatttcggttgtgtcgtgattgaggtaataaaaattcttcgtgccttctgcgcgatagtcgattagtttggcatccttgaggactttgagatggtgtgaaaccgcgggtcgcgataagccggttgcttcagtgagttcgctgacttgtagcccgtcacaatcactttcctctaataagcggatgataatggcttggcgctttgggtcacctaaggcaattaaaaattgactaacatcggttaagtcttgttgtaatgctttgtaatttggcatttgaaaatctccaatcgttcgttagtttaaattattaaaccattaaggcgatactttgtcaacgttagaggatcatgatgcgcaattcacacaaaacccccactaggttggacctagcaggggtttttatagcattaattctctaagctaatttgtgtgttttttgaaaaagggatgatagacgcttggcgttttggtttgaggaagcggtggcgatagtaacgatattgtggggtgaatgggtgggtagatactgcatgccaaggcttctcgtgaccacagaagtggacgattgctggggcctttttggcttcaataaattgttgttgtaaatgttgtgggggtgtggtcttatccatgatgatgttggtttgggcattccatttaggatggagatgcagccattgatcatgtaaaacagcattcagtgcatcttgatcatgaaagcgtaacttctctggatgatggttaatgaagtctaaagttttctcagtaatggcttgttgacgccatttcttaagatccattaacatcatgccggagttgaaatagcgcgtactgtgacacttaatggccattttttcgaggcgctgatggaacccggcgtcttcaaccgcagctagcgggaactcgcctaaatcaatattccaaaggcgttcaaggttaacgttacatagagcatcacagtctaaataaagcgcgcgatcaatgccgtttagcacttgcgggattaaaatccgataataagctgattttaaaatccgatcactttctacgatattggccaagagagcctcatcaactttgagaaaagttaaaccggcattaaaagcggcaaccacctgttttaatggtattttgtctgcttcagttaagtggtcttctaacacatagaaagaatagcggcgttgtgtgtcattgtgattcaaaatcgaagcatataaaatcgccaagggttcaataaaggcagcattaacagctgagacaatgttaatactgtctttttttaatgcgcctaattgttgactatacgcttggtattgcgctaaaaatggatgttctttcaacgtattccaaggtttattgtgcgttgtaaaatgaacgattttaggttgcgcaatagcttcgtcaaaaagttttttataagtggcattaattggctgatgtttgcggaagatgagtgaattttgtacattccaagcgggatgcaataattgaaccttaccggctaaaatggcattcaaagcgtcttgatcgtggaaaataattctctcaggatgctgattgataaaacgtagcgttaattcactaatttgattttcttcccaacggaaggtgtcaattaacatcacgccggaattaaaataaatgttacctgatttttcaggggaaacacctagtcgtggtagtgctagagcttgcccaggatcaataattgcgccaacaatattagtccctaaatggctttcataaagtggcgtaatgtcggtttggacaagaatatcgacgtctaagtataaaacgcggctaatccctttgcgtaatagtatttggggcgcaagaatgcggtagtaggccgttttattaatatggttactttcaggacaattttttaaaagttgttgatttattttaataaaatcgacctgatgtgattgcttggtaatttgtcgcaccaaacacttggtttgtggtgtgagttcattatcgagaataagaaaatggacagttgtctcagcaggaatatgcgccaatatcgacttaatcgcgattaaaagctggtcggcataattattatctgctgcgaacataacattgaccgttttgataatcatcaaccccttttagaatagtgatacaagttaatttaaacaacttgaaattgttttgtaaaggtaaatgattatgctaaatataacccaatcagaatagttgagaaaaattaagtcaatattttatagttaaactgtagcgctactaaaaaaattatggaaggacgtttgctatgttgaaagaagtgccaattaataaagtgagattaggtagaagtacagttaagacgccggatttgagtttgatgattgaaaaacaagaatcaaaattgaattgttttctagagggtgttactgatttagaattggccatcttaaaagcgaataatggcgaagcacttctagaaggaaaatgggggcctttggcagtcgatcgagttggcaatgttattaaaaaccaaacgattaaaccctatatacagcagtaacgaagcgtcataaagttgatagtaatagcgattattcagagaggacgagtagatggtttcgagaattttaccgattgaaaacgggcataacttcagagaattggggggttaccaaacattagacggcaaaacgctaaaaacaaaacgcctacttcgaacagctaatttagctgatcttagtcccaaggatctagcgcttttaaacagttataacgtctcagtggatattgatttacgctccaaagatgagcgacaacaagtaccggataaagtaccagttagtgctaaatataaatctgtccctattttcaaagaagaccaaaccgaaagtacaacaactgaggcggaactctatcagcgctatacaaacaatccacttggtggccaaatgcaaatgcaaaaggtctatcaagaattagttcaagatgaacactcgattaagatgtatcgtcaattttttgaaatattactccaacagtctgcggataatcaggcaacgctgtttcattgtacgggtggtaaagatcgaacggggatggctgcatattatcttttgaatgcgctaaacgttcctgaacctgttattcgccaagactatttactgacaaatactgcctcgcaacaacatattgcccaacgcatgtcacgattagcggctaagcacgcatccagtggctttataaaaagtacgcacgctttaatgagtgtgcaatccgcttatttagacaccgcaacaactacgattaagcaaaattggggttctacgcagaattatttacagaccgctttaaaattaagtaaaagtgatattaatcagttaagagcaacctatctaaattaagtcaggaaaggtgatattaatggtcaaagcagatttgaaagacccacgtgagttatataaagtatccggatttgaggagcaagaacaaccagctccggcactacaaggcaaaatgcggccgaaacccgattgcggtgaggcagattatcaagggcgtgagcaattgatgaatcgcaaagtcctgattacaggtggcgattcaggaattggccgcgcagtagcaattgcattttcacgtgaaggtgcggatattgctttacagtatttacctggtgaagaaagtgatgctaatgaagtcgcggggttaattgaatcagctggtcgtaaggcagttttaatcccggctgattttaaaatgcaagaagcaccgcaacaagtggtagcacaagcagtggtacaattaggtggtttagatacagttgtgttgaatgccgcccaacagattgcccatccaacgcttgaagacttacccatccaacaagtacgggatagttttgaaattaacgtggtggcaatgtatggcattgctaaagcggcgattgcccatatcccagctggtggtagtattctgacaaccacctcgatccaaggattcaatccaagttcacaactcttagactatgccgcaactaaagccgctattaggaattttacgattaatctcgcccaacaattagcagataaagggattcgcgttaatggtgtcgcgccgggcccaatctggacgccacttcaattagcgcaaggccagttagagggcgcattaccaaaatttggacagaatacacttttaaaaagagcaggccagccagttgaagtcgctccagtctatgtatttttagctagcaatgctgctagctacattaccggacagatatacggggtgaccggtggcgaatcaatcaactaaattgtcaatttatttgcttatattatttataaaatgaataagtgtatacttttacaaaacaatgttgaacttgttacacttaggtagtacaagtagtcgatggaatatcgattataataaatagtatggaaggatgattattatgttacattggttatgggttttaattattggggctttaattggtattattgcgggggctattacaagtcgtgatttacccgctggttggattggcaatattgtagggggccttgtcggtgcctggttaggtcaatcattatttggtagttggggaccccaactagcaggtatggcgctagtaccttcaatcttaggtgccgtaatcatcgtattcttagtatcaatgctattttcacgtaagaaatcctaaagtaaaggagcagataccatgaataaattgacaaaaacggtaatcggcttagccagttttctgggattatgtcaggtagcatggttcattttgctcgtttatccgctaggactagcagatcaacaagccattaactttaactggctgtcagaagagtggattagcaatatagggctgggattgggcgttattagtggtctggtttttctttatttattattactagcaatttttagtttgccaaagaaacgtcagatgattattaaaaccaatcaaggggaattagctttatcgcgtaaagcggttgaaaaaacaatttcccaggcaataattgaaaaacaccgtttgaaggatgtttatgtccagaccgtttttaaaggtcgacaaccaagggttagtgcagatattcaagcaaaagtgcttgataatcgggacattgatcagcaagccagagcggtgaaggaaacagcacaacaggcactcaaagaggtctttgacatgccaattaaatcagtaaatgttaagcttgcgccacttgttcatgatcaaggtcggacgcaaagtaaagtgatttgaggtgaaacaaatgaaacgttcttattggggctttattgcaggcgctgcattagcggcaatatggattggctttggatttgtgagcctaattttaattttgattgccggtctgattggctacattgcagcaagtttaacgggatccaaagatgatttagaaggttttagagcacaagtcaaccgcgtattaagacaagataaataatggaggtgcagcaaaatggtagaacaagcacatttagatgacgtattagcaaacagcaagttaacgttcgaagatgctgtcattgcaaaaattgctggtaaaacagcacaaaatattgatgggttactatcaatgaatggcaactttttcagcgatatcgctgatcgattcagaactgatagcgatcctaccaaaggcatcagtgttgaagtcggcgaaaaacaagtggcgattgatatgactattattttggaatatggtcgcaacgcgcgcgacgtatttgaacgcttaacgtcggctgtcaccgaagctgttgaatcaatgacgggattgagtgttgttgaggtcaatagtcatgttagtgacgttatgactaagaaagaatggcaacaacaaggtagcaacgctaaaaagagcgataacgacgacaaaagagttcaataaaaaattaagaaaaggggattaaaataatggataagccaaacaaaccaatggataagatgatggacaaacctaataaggaaacaccaaatcataacgcacaaattgaaaaagaattaaacttttcagacggtgtgattgaaaaaattgccggtcaaactgttcatgatatcgatggtgtcttagaattatcaggtggtatgatgagtcaattagcagatcgtttcagagatgaagcagatccaactaaaggtgttgatgcagatattgacgatcaagaagtgacaatcgaattagatgccattttggaatacggtaaatcagccccagatatttttgaacaaacaaccgatcaaattgccaagtctgtgcataagatgaccggtttaaatgttacaaaaattaaaatgaatgtttctgacttgttgactaagaaagaatgggcagcaaaacaagaagcaggtaaaaaagataataaagataacgaataaaaaataggtggtcctcaatgggaccacctatttttttgtgctcggcgttattcaaactgtgctaaatctaaatttaatgcggttgcggcgcgtcgaccgtattctggatcagcttggtaaaattgtttaacttcgcgaatttgaatttctggtttagttacttgaccaagattcatgcgaatattttcgattaaacgggtttgttcatcagcggatagtagccgataaagtttgccagctgctgagtaataatcgggatcggtagagaagttgccagttgtaccagagagttgatcactatgaatcttagctgctgggacttcagtgggtccatcttgactatttggttcgtagttaacgcccgtttcttggttttgggccatgacaccgtcacgttcgtaattatgaacagggacttttggtcggttgattggcagttgttcgtagttggcaccaagtcggtaacgttccgcatccttataaccaaatagtcgaccttggagtaatttgtccggtgatgcttcaattccagggactaagttagctggtgagaaggccaattcttcgatatcttcgaagttattcgttggattttcatcgaggaccatttgaccgatttcgattaatggataatccttttgtgaaataaccttggtaacatcaaaaatatcttggggataattcaaaccatcttcataagggacgagttggacggcgacagtccaactgggataatcgcccgtttcaattgcgtcgaataaatcgttttgaaggtaatcagtatccttaccagcgagttcatcggcgagttcgttgctgagattatgaacgccttggttcgttttgaaatgatatttaacccagaattgttcaccttgtgcgttgacccatttgaaggtgtggctaccaaagccgtgcatcattcggtaactggcaggaatcccgcggtcactcatgagaatcgtaacttgatggacagattcgggtgaaagggaccagaaatcccattgcatatcttggctacgggcatgtgtccgaggatcacgtttttgtgaatgaatgaaatcggggaattttagtggatcattgacgaagaagaccggcgtattattgccaacaatatcgtaattgccttcttccgtgtagaatttaacggcgaaaccacgaacatcgcggtatgtatcgggatagccagcttcaccagcgacttgagaaaaacgagtgataagcggtgtttttttgccgacgccactgaagacagcagctttggtgtaggcgctcatgtcttttgtgaccttgaaataacctttagcgccagcacctttggcgtgaaccactcgttcaggaatgcgttcgcggttaaaatgggcgagtttttcgagtaattgataatcttggattaagacgggaccgcgttggccggcagtttgtgaatgttgattgtccgcccatggttgcccttcgttagtcgttagttgatttgtcataatatttgacctcctaagaatagtttaaaaactaggaacacactagaaaataattgtgcgcaacttacctagtcactataggactttcaaccgagaatcgtcaaatgaaagtgcttgctcaaaaaatactaaaaaacggttaactacaactaataatttctcaatagaaataaaaaaaattcctagattgtctatattaagaataataatgcaataattaattgataaagaacattagacaagaataaaaaaggagtgccgagtagttatcactcggcactccttttttattttatttaatctagctttgtaaatattatttactaataatacacactcggttgagttatcaattcattttgatttattttctaatatcaacctcttgaaggatttctataggttcgtggcagtagagttttagcactttatcataccaataagttcataactcaggagttatgacactctctgttgtgccacctaaaggtggtatttattggtctttcggtagatagttaatatattattatttatctatcgaaagtataaacgctgttaatcaataccgaatcattgattcgattatataaaatgacatgcaatcaatttagtttcttatcatcgtcaatgatttctcgggaggggtaaaatgtgactttaaatagacgaaatataatgttcagtttggtgttactagcagtaatgggtatacaactagttgttactaccggaacgatccttgctgaaaatagtatcaaagtagattcaaatcttgcgttaacatcggatcaggaattatctaatgaaaaacaaattgtaattagagcgagcgatcagtcaaaagcgcaacgtgatttagcgctaactataccagagggggccacatttgatcgcacaactagtaatcaattaaacaaaaaatcagcgtatacggctacccttgatcaaaaaaataattccaatcaagttattttaaaacaaacagcacaaacagctgaaaatattgagaatgatttggtaaatagacaagcaacaacgttcaaaaaagaatacttattagtttttaaactaaaagatactggtatatccgctaaacaacagttgaaagtgacaacaataatgaatggcgttcactatgaatctaaaccactattgctgaaagatatcgttggaacagatggtgttcaacgacaaactagtttgtcgaaggaggatacacctcaaataacctttaatctaaatcaaacagaatatatcgttggagataccatccagttaaaagttgatcttaatgctagtgaaatcaatgagcctctctatattaatcttggcaataaagcaatactaacgccgataaaaatatctagcgataacgggggtattaactttgaatcacaaaataatcagaatacagggaagaacattttaaagatttccagcaacgaaccgataaagaaagattttacgctactagtaaaagcgacaacagttgggaaggtcgatattacggcttctaccgaaactgatcatttaatttcgaagacagctactgttaaagtgattgataacccaacatcaaaagcattagcaattaatcccaatacttttgatgacggtattcctaattgggttcaaaagacaaaaacagaggtcggaagtaaggcttttcaaggaagtacaagtcgatttcttaattataccttcggtggtgtgaatggcggaattgacgcagaagcagattcaaaaatttctagctacaatattcagggtagccagattaatatctttattaaagataacaataaaacaatcggcgctttttttaagggagaagacactagtagtaaagcagtaagaacatcaaccggttttgggattgttttcgaaccaaatgaaagtaatgatggacctaaacaagctatcttagctaacaagttaacaaataaggcatattttgtcgggcacgacagcgagggtaaccttgttagcaaaataatggggcagtttgaacgtaatgggaagacattaattgctgaaattctattgcggccttcactatcaggtactactgcggttcaacaagagctttatttgaaaaatgacacaactcaatccgtttcttatgggacctttattggtcaagatacaatgttaaacggtaatgataaagtaccgatgtcatcaatgggcaataacgcaggattatatatcactcaaaatccctataaattggccatcaatatgaaggttcctgatggaccaattaattatgcggcacaaacttggactaggagaaatccttggtttgatgggttcacaccacgtaatttttctggaacgggcttggaacaaaagaatttagaagagggttacacagttttaaaaaattccgatacttcatatacagccaagtggccgtttgctaccttggcccctggtgaatcacaacattatcgtcaagatatagggattactaaagcccctgacgttgcaccagaagcttataaagaatatcaaaatgaaactagtactgatgggagtaatagaccaggcgataatataaagtttacattacgtgctcataattcgggattggattcttcttggagtgatgtttcgtttagtgatattattccgtccgaatttcaaattaatacaaattcaataaggttaataaatcaaagcggtcaagaaataaccatttcaccgtcagcttacaatgaagtaactcgagagttgaaagttacggttcctaacagtgttaaagataaccagtgggttagtgtcacatttgaagcgaaggctttaactacagcttctgggcgaactgttcgtaacactgtcaatgttgttggtatagacagtaatgttaatcaacaagaacgttcagcaagtgcgatagtcgatgtaccgtttatcaaagtacaattaccagaattaacgaaaaaagtaaaaaatatttctagattagatgcgaagtatgctactgaaacagaagcaagtattggcgatgaaattggttataaattagttttcactaacactaattctgaggaagtaccggaggccattattgaagatccgctcgattctgatctagatgaaccaagcgctgttcatgttagttataaagattcaaacgggagtgaggtgagaagcgaagacttaacctttactggtaatcaattaattttaaaagctatcccagcggatggaagtgtggtgttaacttttgagactattctcaaagacactaaaaagaccgttattaataatatagctatggttgctgatgttaaatcaaatgtcgctaaagtcaatgttatcaaaaaaacaccaccaaccctaattaaggaagttaaaaatataacgaagtccgacgcagattatatgacagaaacaacggctgaagttgacgatgagattgaatatcggatacaaattgttaacactgcctcaggcgatattaaaccgggtgcaatattaaaggatgtttttgatgctgacttaggtgatattcaacaagttagaattgattatttggacaaagatgaaaaaattattgcgaagcaaacaactgattggactgataaccaggttatcttggatcatggtattccgattgcgggtcaaggtatggcgattgcttatgtcaaagccaaagtaaaagagactaataaatcagtgattaataatagtgttagtctggacaccgattttggagctggggcttctgaaaaagccaaattaaatattaaacagtctaaaggccggattgttgttcgctatcgggaccgaaaagatgaaagccacaagttggccgaagatgagacctttgatggcaaaattgggaacactagactagtgcaacccaaagttattccagaaacagacggcaattggaccgtggttgattcttctaatatggtagatccagattggggctcaaccacgaaacctgattggacattggctcatgattatactgtcacttacgccaaagatgaacaagtcattacttatcgatatgaagaatcccacattggcattattgccgataaacgctgggattttggtaaacatgatacgactggcactgaccgaaactattatctaaaagctaaaactaaagacaatcaaaaacagccatacgccgtcagcgttgaggattactacacctctaagggttggactttaaatgttaaacaagatgatcagttccataccaatgctaatgaaaagattgctggagatcaaaaattcttagataatgccgtcttaaatttccataatgggcagattgtcttaaaagaaagtgatgacgtaggggcaaccgccccagtttctaaggtaacttctgagtttgagttaacaccaaaaggcgcggcagttaatttaatgacgcacaccaataagacacctgatcctggttattatgccgcacatggctttgggatttgggcttatcaatttggggatgcccaacaggctgattacagcattggtttgaaagtgcctaaagcaacaaaacgattcccaagacaatatacaagccaattaacttggtcattagtaatcgcagaataataaaacgaggtgcgtacgattgaaatttgttagacgtttaatggcattgagcttggcgtttgtgggcttgatgctctgtcaaatgacacaggtccaagctgctgctcaaacccaaaaagcggactttgaagtgcagcctatcttgccggatgaacaagaggatttaagtttaaattacttcaacatgagtttggcgcaaggtcaaactaaaaaaattgaaatgcggattcagaattttacggatcacgcgattacggttcattccgacttgagaaattcgatgacccaagttggtggtggcgttagttttcaagctaacactaaagggttagatccaagcttgaaagtaccgttcactaaaattgctaaattagataaaaagagcgagaccattaaattggcagctcaagagactaaaattcttaaaatgacggtcaaaatgccggaagatcgaacaaacggcatgatttatggggattggcattttatcgaatatcttcataaaaaaggtggccaatcatcagttggtagtaactatgcctattcagtgggcgttgcactgaaaggccaacactacaaagtttaccctgaattgaaatatgacaaaacagaagccatgatttatcggcgtcatgctgcaatggggattaagatccgtaatacgcaaccaatggttattaataaggttagcgccaaggcagttgtttctaaagaagggctcttttcttccaaacatgtttatacgactagcaatcaatctgtagcccctaactcagtgttaaccctaccgatttcgtgggattacgaacagttgaaaccagggaaatacacgattgatacggttgtccatggtcagaatctctggaacaagttgccattgacttggcgcttcaaaaagagtttcacgattaaggccgatgatgtcaaaaccgttaatgcacaagcgcttaaaaagccaaagaataagtgggcttatgtggcaactgccagtggggtcttaatgctagtgtcaataaccggtttgattaaagtattgagacgctcatgaaaaaacgatgcttaataatcaccataatgctcgctttttggggattaatgcgacaggcaacaccgcaactagtgacggcagcaactgctgatgctaaacagaaagtgacatttatgatttatccagaaataccaaaggataatcttggggggaataaactcggctacttcaatcttaaattaaaaccaaatactgagaagactttaaaaattaaggtctttaacccaacgaataagccaattaaggttaaagtcagcgccaaagatgcgcagactgcagacgatggtcgaattgattacttatcggatgatccggtttctaaacaacttttgccagagccggggagtcaatatgtccattttaaactacaagtagtcgttcccgctaatacccaaaaatgggtgaatgtaaatgttaagatgccggacactgcttttaaaggcaaaaaggcgttcgcgattaacttagcggcaatggggccaacaggtggcagtatcagcaaccgctacgtatatgcagttggcgttactttaaatgggataaagttaccacgcaaagaattacatcatttacaaatgcctacgatgcagacgggatttgttgataaaaaagcagccttacagtttaaagtgaataatcccgatccgatttttctcaaaaagggtcaattatcaaccaagttaaccaatcagaagttaggctttttcaattacaagctggatttgaaaaaaatgcatatcgcaccgaattcgagtttcaacgccaacttgttgttaggcgggaagcgtttggtaccaggtcgttacacgatgattgctgatttcaagagtgatcagtatcaacgggaaattaagaaaactgttcaaattactaaaacggatgcgcgctacattaatgatcataatgtggcctatcagaaaaaacgacaattaaccatcattgtcattagcgtgtgtgtcgtgttaggagttatcttaatttattatattcggaaacatggaagtagggagtcaaagaatgattaataaattaatcgataagtatcactattcaaccgttaaatatacgttcattgcactaaccacactgacgaccatcttatttctggtgagtctagccttcgcaattgtgagttatatcaattttaatacgtataccacactaacaatgtaaggcagtactggctgcgctgatcgttagttttggattatcagccataaaaattccgtcaaaccaactgaatggttgacagatgtacccatccaaacttgttataacggcaccataggtgtgttatataaaaaacgtgcacaaagcacaaattaaacctagggaggaatttcaaatgaaattcacaaaattgacaagtgcagctttaacagccggcacaatcttaagcattcttgcaccaacagcaacattcgctgccacagtagaacacgatgccaacgctaatggtggtacagaattaccaatgtctgttaatacagaagttgggatctcatttggtgataactctgataatgggaatactggctacttacgtttacaaatggtaccgcacgtattagattttggtaaccatacagaattcttatcacaatacccaacatttgatgctactggtcataacgtaagtatcgatagcaatgatcgtcatgcgtcatacaagaacacggatacaaatatgacagctgttttaaatacaaacgatgctaaattagcagatgttaagggcaaagcctgggcgacagttgttgataagcaaatcacacgtgaaaataacgataccggcgatgatgctaaaacaacaaaacaaagtggtacatggcaattaaaagttaaatcagatgatgttttaacagcaactaataatggtgaaacaatcaataacgctaacttattgctcaaaaacactgcttatggtcagacagcagacgtcttcacattgacaaatgaagcgcaagatagtgatttccaagctgatccaacaattgatgacaaagatgtttcaacaattgctaagaacgtttcattatcattagacggtaaaggtcaagaagttgaagttgctaatgctgctgattctgaaggccaaggcgctaacgtctttggttgggatcgttcagacatcaacttaacattgccaaaagattcaaaagttggtaatgatatctatacagctcatttaacatggacattatatacaggtgttcaagcttcataatatcgtttgtatacaaaaaggattctggttatccagaatccttttttagcagaataggttaacatgactaaatataacaataggttaagatgaatgtgaggtgaacatacgtgagtaagaatacattagcattttacgaagcagttcaaatgctagataatacaagaagagcgctcaatgaaccctgtgaggcatatcatatttcatttgaacagtttgttttgatgaaacgaattgctgcagcgggaggtgtcaggccaacaatattgagtgaagacctgcatatctcaagagcagcggttagtcgaaaattaacgcaactttattatagtgattacttagctaaagaacgcagtggtgttaacgaagatcagcgcgtcgttataatttcattgacgccaactggagaagaggtcgttaagaagatagataaattctataaatctaagttgacaacacttattgatccaatagaagaaatacaggcaactgcaaaaatttttgaaacgttgagtcagatagattaagaaaataaaaaaatgagcttcagacagtaatttgtctgaagctcatttttatttaacaattagtcattcaagttataacgtaatttcatgtgttctgagcctgaaatcaccatttcgcctaatagttttgtttggcgttggagtgattctattgctagtttgttattggcttcttccaagaaggcaacggcatctttttgaccgtcaaaggctttgtcagttgcgttttggatttcgtgataagcgctcattgcttctaattcgaaggtattgcgcatatcaacgtagaagtcatagtctgtatcgccaagtaaggctgttgtacagctcaaccagtacatattgttaaggtcgaatgttcctgtcgcattcttgtatgattcaggtgtgtcattaacgttggcgtaaaatggcacaactgtattgaaggtattagcaccgtaagctaaccagtgaataccagcgatttcagcagggacgttgttacgaacttgtaaaatgtgcacattgtggttccggttaatcccgataggacggaagcgtgttttaacgtcttctggtgcgctaccgtaaggatcgtattccgtattttcaaagtgggcgctcaagacaaacttaacgtcttcgattgaaattttacggttggcatggcagatgaatggtaaatcatggtccattggatcttgtttaatttcggggttgaaatattgttgaccataccaagtacgagggttgttataaacggtatctttgatggttgcactaccaaaaatgtgacggaggttgtaaccttcaaagtctgggtttaagtgattatcatcaattaacgcttttaaatcagctgaacaaagtgtgttgtctgagccaaagacaaagtgattgatgttcatgcggttaggggcaaccacgtaagcatcatcagggatgcgaacagcagcccagtgatgaccaccgattgtttccagccaccaaacactgtcttgatcagaaaaagcaatcccgtttggttcgtacgtgccgaattcttcgagaagcgcgcctaaacgttcaaccccttcttgagcactgttgatgtaaggtaagactaaagtaacgatatcttcttcaccgataccaccggcaacgagtgggtctaatccttgaatacgagggttagtggtaattgtttcggttgctgacattgtgacgttttcgctgttaatcccagcagctggccagatgccgtttgtgagtagtgagttaggaattgatgtataacgcattgggttatcaggtaatttgatttgcacaccactgattacggcttggtaatcgcgtggttggtcttctggattgacgacaacaaaacgttgaggatctagcgcttcgtgaccatcatcatttctagaaatcattgttgaaccgtcgattgaagctttcttgccgactaagactgtcgtacatgaacccttaattggttttttcattattaaaacactccttatcgatttgttagtactagtatagcgcttttggaggggaaagtgtgggatttagagtgaattcatgtgaaaaaattattaattaaatcaaatgttatctttaatatttttagactaggctaaaatatttgttaattgcgttaaaatcagttatgctgatagatgtaaagttaggtatacctaaaagaatggaggctctttatgttaacagttaagaacctcaccgtggcttacgatgacacaccagtatttactgatgttgccgttcactttgacgcaggcaaaatcactggcatcattggaccaaacggtgcaggcaaatcaacactcattaaagcaatattagggttggttaaagcacagcaaggctcagttttatatcaaggaaaatcaatgcgggctgtccaaaaacaagttgcatacgttgaacagcgaaaagatttggatttaaattttccaatcagcgtttttgatgttgtattaacaggcacgtatggcaagttaggtttgtttcgcgatccaggcaagcaggcaatagcggccagtcgagcagcactagaacaggtggccctcgctgattttgaacgtcgccaaattggccagttatcagggggccaattgcaacgggttttcgtggcccgcgcaattgtacaagaagcggagatcattattttagatgaaccttttgtcggcattgatttacaaagtgagacggcaatcatggccattatgaaacagtggcgggatgcagggaagacgattattgttattcatcatgatttgaataaggtgtcacagtattttgacgatttagtggttatgaatcacggtatcgtagattatggtccgactgatcaagtgtataatgcccagaatattgagcgcgcatttagtgccgacttatcggccgtcttgtttgaaaaacaggagggagaccaatgactagtatttcagcatttattagcgcattagagcgctacgaatttttacaaagtgcattattaactgccattatggtcgggattatgtcggggattatcggaagcttcatcatattgcgagggatgtccttgatgggcgatgcgatttcgcatgccgtgttacctggcgtggccgttgcctatatgctggggatcaatgtgctagttggcgcatccgtattcggtattttagcggcggtcttgattggctttgtcgcgacccacagtaaaattaagacggatacgtcaatcggagtcgttttcagtgcgttttacgcattgggctttattctgatttcgatggcagaaagtgcgacgaatctccatcatattttattcggtaatattttagcagtgagtgatcaggatattatgacgaccgcgattgtattaggcatcgttatcttatttgtttcattcttctataaagaattattgattacctcatttgatgaaacctacgccagaacttacgggctcaaaacgcaggtcttacattatggcttgatgctggttttaacgttagtgacagtttcggcgttacaaacggtcgggattattttggtagttgcgatgttaattacacctgctgcgacggcctttttatggactaataaactcgtgacaatgctctttttatcagctagcataggggcagttgcggcaattagtgggctgtatttcagttataccttcaattgggcgtctggcccggcaattgtcttaatggccgctgttttgttcgcgatttcgtttatctgcgcacctaagcaaggctttttgaaatggcgtgcctctaagggaggacaataacgatgaagaaaatactcattactttattaaccgtcggcgggattattggtggcgtgtacggctttattcaccaacgggcacaatctaaagcccaagccaacaatcaacacaccaaagtgcgggttgtgacgactaattcgattttagaagatatggtcgccaatgttggccaagagcgggttgagttgtacagtatcgttaaacgggggaccgatccccatgaatacgagcctcaaccaactgatatttcaaaagcgacagacgcggatgttttgtttcataatggcttgaatcttgaaacgggtggcaatggttggtttaaaaagttagtgtcaatcgcacataagaagtttggggaagacgtttttgcgacgactaaaggcatcaaggtccaacatctaacgaccaataaggacgaaccagatccacacgcgtggttggatttggccaatggcatgcaatatgttgaaaatattacagccgccttgcaagctaaggaccctaaaaatgctgattattaccggcagaacgcggatcagtatatcgcgcgcttagaaaaattacacacgaaggctcagacgcaatttgctgatattccagaaaagcggcgcgtattggtgacttctgaaggtgcttttaaatacttcggagaagcttatggtgtgaccccaacttatatctgggaaatcaatacggaatcgcaagggacgccaactcaaatgaaatcagtccttgccaaaattgcggcaacagatgttcagagtttgtttgtagaaacatcggtatcaccgaaatctatggctaaagttgcccaagaaacgggactgccaatttatgcaaaaatctttacggattccttggcgcaaaaaggaaaaccgggcgatacctattacacaatgatgaaatggaatatcgataagatccatgccgggatgagccatcagtagaaccactagcttatgatacgattcacctaaaatttagtggtataaaatggtatcctttttaaaaagagtattgggtgggattatggatggtggatttggcagattgtttattagtgattgatttacaaaatggggtttgcaaaggtaaacaaccggttgctaactttaaacaattgattgaacaggtgaatgctagaattgaaatttataaagcgaataagcgaccaataatttttgtccagcataatgatacaaccttattagcaccacaatacgcttggcaactagtgccagaattatccgtgccagctgatgcgcaatttgtgcaaaagactcatgctaattcattctggcaaaccaatatgcaggttttattagaacaaaagcaaatccattcactagaaatttgtggtgcgcaaactgagtattgcgttgatacaacagtcaaggtagcccacagtctgggttatcaattacaaatggtttcaggactttcgacgaccgttgctaattcattgatgacagcaacacaaacaatcgccttctatgaagatatttgggcggatcgatttttaaccttaattgaaggctaataaaaagggtttctctttcgagaaaccctttttattttggcaaggtactaaatttaaacaaactaatgaaattatcattaaccgtttacattttagtaaaagtttagtaaaatgaatttgttagctgaagaatgcgtttacaccgcgattagagatcacgcttaaacggtttccggctaaaaatctattttagaaagaggctattagaatgaatgataataaattaaccatcgatgcagatcaatttgcagcagccattatcgccggaaatccgaagcaaacaaacgaagacaacaaggtttatattaaacgtcaattgacgttatatcttgaatccgttttattagcaaacgattttaattcattagaagaaaaccagtttggcacagccaaggaaaagcaacgccaagctattttagaaaaaattattgaacaccggtatcactagttttaaatcaaatgaaaggaattgaacaatgaaaaaactaaaagatatcaaacaatatagttcatatgcattcggggcatttggccacgatgctttctatgcaacacttagcacttattttatgatttttgttactagccaattattcgatacaaaaaatgccgcttttaatgcaaaaatgatcggttatgtcacttccatgatggttgtcatccggattgttgaaatcgcctttgatccacttatcggtggggtagttgataatacccggactcgttgggggaaatttaaaccttggttactaattggttcattgattagttctgttggtttagtcatgatcttcacgaacttcggtggcttagcaacaaacagcccttatttatacttagttctttttgcgatcgttttcgttatcttggatatcttctattcatttaaagatattgcattttggtcaatgttacctgctttaaccgttgattcagaaaaacggacgaagtttggggccattgctcgttttggttcaacgttaggtgcccaaggggtaatcatcgttattgtgccaatcgtcgtcttcttctcacaaatgttttcagggacacatggtagcgaacaaactagcgctggttggttagggtttgccgttgtcatcggtgttgtttcattcttaggcgctttagcaacgattatcggtactaaagaagaaaagagtgctatccgtgaaaatactgaaaagattcgtttccgcgatgtcttcaaagtaatcggtaaaaatgatcaattaatgtggttatcattatcatatttcttatttgcttttagttacgttatcacaaactcacttttaatttactacttcaaatacgtcatgggtcgtgctgcagccttctcaacagttggtgtgattaccgctatcttaggggttatctcagttgccttattcccaacgttagtatcattgattcaccgtcgtgccatctatcttggcgggattgccatgatgatgctcggctacattctcttcttatttgctggtagcaacttagttgttgtcttaatcgctgttgggttattcttcttcccatacccacttgttttcttagccgctttaatgacaattactgatagtgttgaatacggtcaattgaagagtgggacacgtaacgaatctgttacgttagccgttcgcccattattggataaattagctggtgcctttgccaacggtgttgttgggattgccgcaattcacgcaggcatgacaggtaacgctaaaccaagcgatattacaaatggtggtttattacaattcaagacatacatgttcttcgtaccaatggctttattaattgtttctgctttgatcttcatggcaaaaattaaattaacagaagcaaaacacgcagaaattgtcagcgaattggaaaagaaattagattaaaaaagagtgtgttataagacgataatggtctgaggattagcatagattggtgaatgagcgctgaaagcgattgttcaccaattgtcgctaaacgcagggccatgtcttataaaagcatgttaaaaaaagagtgcgttcaaagcggtttgatgctgagcattagctgagtgttgtgaataaccagcatggctggttgtttgcaatacggtgctaagcgcaagcgtcagctttgaaaagcacgtttaaaaaaagagtgctgtaacacttggtcagcttctgagcattaacatagagtgacgaataaccgatggaatcgattgtttggcaatcgtcgttaagcgcaagaagctagtgttaaaagcacgtttaaacaaacaaaaaagttcccatccttaatcaggtgggaacttttttggattctaaaataataaaaaaacctaaaaagtattaagttggcttaataaagcgaccatctttagcgatttttaatatactcgaataggagattagtaaacagataggagtcgttattttgaagaagttaaagattgtactaggggttatcggggttattttagtaattggtgggggtttttacaaaataaaagaaaaccaagcaatctatgcgattaaaacccaaaacaaacaggtttccaatcggattaatcaggataaacctatctcatttttattattaggggctgatacggggtctgatgggcgtgtcgatcgcggtctgtcggattcgatgatggtggttacgttaaatcctaaaactaagaaaaccttggtttattcaattccgcgggattcgctcgccgaaatggttggcagcaagactaagaatgttcaaaaaattaacgcggcctatgaactagggcaagcgaagatggctaaaaaaaccgtcagtgaatttatcggtgtgccaatcgattattcggtcacgattgatatgggcgcgctcaaagaactggttgatttcgtcgatggcgttgatgttaaaacaaatatcgatgtgagtttcgatgggcagacaatcaaaaagggccgccaccatttaaatggcaagcaggccctagtttatacacggatgagataccaagatccccgtggtgattatggtcgtcagttgcgccaacaagaagtcttgcgcggggtcgctgataagattcaaaagccccaatacttggtccatttatcaggtttaatgacaaaattaggcaagcacatcagtacggatttaacggctgatcaaacgaaaacgttaatcgaaaattaccatcaatgtgggaccgacattacgagtggtcaaatcatcgggaaagaagcctggattaacgggagttcttatcaagtgattgcgaccgataaattgcaagcaacgtctaacaaacttcgtgagagtctcgggttacaaaccaaaacgttaagtaacacggagactgaattgaatcaattaaacacggacttctttaaagacaatactaataagacgtttaatactgatggcttaaatacgacttattattcagataatacgtattagttaattagcgtggaatcaattgataacgttggctagcgacaccgtcgataaaatcgcggtcatgttcgatgaacaagagtgttgggcaggtttggacaattaatgtttggagttgttcgcgcgtaatgacatctaggtagtttaacggttcgtcccagacataaaattgggcttcttcacaaagcgaacgagcgagggcggccttacgtttttgccccatactcatcgtttcaagccggtggttgaattgttcccgctcaaaacccagtttccgtaaagttgagagtaattgttctagtgatacctgcttggcggctgcaaagtcagctagagagccactgagctgcgcaaaatcttgtggtaaataagaaaccttgattcgcgacgcaatggtcaactgcccactgacttgatgctgcatttcaggaagtgcgagtagggctttgataaaggttgattttcccgtaccgttagcgccggttaatgcgacttgttggccggcctttagttcaaatgatagcggctgatttagggcgcgaccatcttgttcaagtactaggtcggttgcggttaggacgatttgttgcggctttaaagactgattgttaatcgtcagtggtgcggtaatttcaacgtttttgagcagaccttgtttttcagtagccgcttgttcactacgagcagtaaccgttgtggcgcgcttcattaccttagcggcgcggtgtccaatgaagcccttatcgagattggcactttcatttttgacactacccgcatttttaccacgttcagcctgttgggaccactgagatttttgttgggccgtttgattcaaccgcttgatttcacttttgagcaggctgttttgatgctgttcggattgggtttgttgttcctgagtggtctgccaggtttgataatcgccttgttggacggtaatatctgcccgattgattgataagacgtgatcgataacttggtttaaaaagtgccggtcatggctgatgacgatgaaccctgttttttgttgtaaatagtgtgccacggtatcacgaccatcttgatcgagatgattggttggttcatcgatgagttgaaaatggtgctcgtcgatgaataataacgccaagagcgccttggtttgttcgccaggactcagcgtattgaatggttgccagagacagtcgagatctactttgagtaaattgagttctcgttcaatctgccaaaaggtgctgtcatctaattgaccgagcgtcattagaacgtcgcgggccaattgactgggatcggctacggtttgtgggaaatagtgaaaatctagatctgttttcagttgtccgtcaaattctaattggcgttgaagtagttttaacagcgtcgttttgccccggccgttgcgcccgattaggcctaagcgccagctggcatcgaattgaagtgtgacgtctttgaaaagaggagtcgcttgatctggatagttgaatgttaattgtttgaattggattgtacccattaatatcacctcataaatttaaatgagattggttggttgtcgttttgtatgcacaaaaaaagacgctactgagggcgtctgttaacaagtctggttttttaccggccctgaaaataaacgcaagctagctctaacgacaatcagaaataaacggtccccaaacgtggggccatttagtaccaatcgagttgtcagaaatttagcctgcaattttcaatgccagtcacatcctttgaataagttgttttaaattctagcagattccttttgaaaaaacaactgcttaaaaaaggctttacaatttcgatgggcttggctatacttagaaattaataataacaaggaggttttatcatgatgacaatgcaacgagttgcctttaactttttctttaagaaacccagaattcgactggttgattaagggaagagattgtctattacatgataaaccttaataaactggaagatgactgggtaacccgagtcatcttcctggtggagctcactagtgaagactagtgggctcctttttttgttattagaaaaaaagtgcgatatatccggattatagaacacgacaagaaaaagagtgcgtttgaaacgggttgattttgagcattagcacagctcgtcgaataactgctgtaagcagttattcgacgagtgacgctaagcgcagaagtcagtttcaaaaagcacgtttaaaaccagagtgtgccgtaaccctggttatattctcagggttaaccggaagaatatgggttacagaacacgtttagcatcaccaaataaagcatcgagagggcgttttgcagatgggtctagggacaagattattcagaaaagagtcacttgagcgttatcttcaacaagatcaacgtttagctaaaacactaacggcgaaggatttaattgcgttaggcgtgggggctgttattgggactgggatttttattttaccaggcacgattgccgcgttacacagtggcccggccattacgttgtcatttatgattgcggcagtggtctgtgcagtggccgcaatgtgttacgctgaattttcatcagcgttgccagtcgcggggagtgcgtattcttacggcaatattatttttggagaactgattggttggttgttaggttgggcattattcttggaatacatgttatcagtcgcggccgtttcaaccggttggtctgcatacttcgtgtccttcattgaaggcttcggcgtgcatattcctaaggcgattacaggctcatttgatcccgcgcatggcacttatatcaatttatttgcagtcttaattgtgacgctcatttcagtgttattaatgtctgggacgcgttcatcgacacgcatcaataatttgatggtgatgattaaaatcggcgttgtgctactattcttagtcgtcggcattttttatgtaaagtcgtctaattggcaaccattcatgccgtttggtgttagtggggtcttcaaaggtgcgtcattagtattcttcgcttatttaggctttgattgtgtctctgcttcagcggccgaagtaaaaaatccacaaaagaatttaccaattgggattatcgggaccttagtaatttgtacgttattatatattttagttgcttttgttttgaccgggatggtgtcatatcgtgaattaaacgtggctaatccagtcgcctttgccttacaagtcgtgcatcaaaactggtttgcgggcttattatcactcggtgctttggctgggatgttcacaatgatgttgacgatgacttacagtagttcgcggttagtttattcaatcggtcgggatggtttgttacctaagatgctcggtaaaattgaaacacgccaccaaacaccaatcaacagtgtccgggtggtgacagtcattatcgcgacactaggggggctcgtttcattagatcaattgacgaatctggtcaatattgggacgttaattgcctttttcttcatgtctattggggtgattccattgcgtaaaagaaaggatattccgaataaagacggtttcaaagtaccgctatatccttggttaccactattatcaggcttactttgtttattcatgttattcgaattaccggcagttacttggatggcagcggggatctggttcattttgggcttaatcatttacttcagttacgggttaaaacacagtcggttaaatgattgattaaatttgcgataaacgtttggtgattaacaggcaaaccgctacaatataatttgaggtgacaactgtgaaacataaacgcttatggctggcgctaggtggtttgttgatctgcatgattggggttttagcaacataccacgatgcgacgcgctacaaacaaccgttgatccaagtgacggctgtcaaaacgatccaaaaaacgaaaacaacggatgattaccagaatcaagataccgagatccaacaaaaagtaacggggcggttcttgaatacgaagcgcaaagggcagacgattcagctccaaaatacctattccaaatctctggccgatagttatcgttattatcggggccagcaagttttcttacaccatgatcaagaccgccatcaatggctcttaaacgaacctaagcgcgatacagtgctagtagctgtgatcttggggacctttagcttattgcttgtgatgatgcctaagcgcggcctgatgaccatcttaagtgttgtcgtaaaccttgcgttcttcattatcacgctccactttaacgctgcaactggtggtcgttggttattgccgctgatgtgtggactcgccgtagttttaactggtctgacgttattgttggtactcggaccgaatcggcaaatgttggtatcatttggtgcgacaattggggctacgttcttggcgttactgttgagcgttatcctgctaaaaatcagtggcgaccaaggactccattacgaaacaatggattatgagctccaaccctacaagacggttttcttggcggaagtcgtgctggggatcttaggcgctgtgatggatgaagcaaccgatatttcatcgtcactgcaacagttagcctttgaacagcccaatgtgacgagacgacaactctttaactcggggttagcgattggtcgagaaattattgggccactcgttaacgtcttgttcttcattgttatggcagaagcttttccgattattttattgtatctgagaaacgggaatacaattgcctatacactatcgcgcacgatgaccttgggcttcacacaaaccgtgattagcgcaatcggcattaccttggccgtgccggtgacaagcttgttggcaagccagttagtggaggtgcgccgcttatgatgttattaacgggtgttttattactactattaatactagtgtgtggttggcaaggcttaaccatctttttcagccttgggttgaacttcgtcgttatcattttagcgctggtcttaattgctggtggctttaatcccttagtggtcagtgggctattgagtctgatcttgttggcgacatcgatcttcatgaatacgaagcaacctttaacggctaagacagcgtttgtgacgtcgttattagtagtgctggcattgttagttatcattgtgccgattagccactgggcagcaacctatggctttggcgcggaggatgctgaagagattgaaggctttggtctggcaatcgggttatcatttccgcaagttggcatgatcatgacggttttagccagtttaggcgcaatcgcagaaaccagcattgcggttgctagtgggttggttgaaattttggaatatgatgaacagatggcaccggcacctttgtttaaagcgggaatcgcgattggtgagaaaattattgcgacagccttcaatacactgttctttagtttcttcggaagcttcctatcattgacgatttggttcattcaattaggttatccgctcgctaaaatattaaatcataaaattttaattggtgagatattaacgttgctaatcggggtaattggcgtgatagcaaccgttcctatcaccagttggttattgaaccattttagaaagttaccaaaggcttaaacattacttgaaaaaaaagtgaattcagattagaataatagaatatatgcatgaaaggaggaaatgcgaaatgtcacaaaacttacatgttagtgtttctggtaaccgtcgtcctatcaaccaaaagaatgctaaaaaacgtaatgctgaaacaacagctgtattgaacttcttgaaggaacgtaaatcagcaaaataattataatgaattatcaaaataattttaaaagaccatctgaaaccgacttgtaaaagtggctttcggatggtcttttaatttggcataaatccgataaaataaatggtattttttgtttgatatgtgaaggtaaccgttggatcattaggtataataaagtcagatattagtaatggaagacagtagtatgttcagacataagcaaaagcagattttttataattttaaatggttaggttatttagcgttaacagcgggggtgattttagtaaccataggaatgctgatacaactgattccaataggagaggcgcaattccatataacaatcaatggtgttgagcaaccatataccattgaaaatgtgactaaaatgcggttactttttttaggtatcatgggaggtttgggtggtctatttctaataaccgcgctgattataattggtcgaagtagacaccgggcgaaattaataggcatgttgaagcaatcaggcgaaaaagttatggccgaggtcattgattatgcaccttcacaggttagaatcaacaatcagcccgccaggtatctggtttgtacgtatcaaaatatgactggcgaaaatcttatttttaagagtggtttattaagatggaatccaatatcgtttctgtcagataaaaaagtaattgtttattatgatagtcgtaattctaaccgttattttgtagatgtggatgaaagtatgggaaaggtagtcaatttataagtcaatctgagtgcatcaaaaaaaccgctaaaattaattagcggttttttatttacgattcgattgtaattagaatacgcgtactgcgaatgaaggcatgaagtaacttgagattgtaccaatcttaactgattcgccaggttgtggtgcgtgaacgtattggccaccaccgatgtagatagcatcatggtatgatgcaccagcgccaccccagaaaataatatcgccaggttgtaagctgttaagtgatacgcgttgaccagcaccttcttgagcagttgtaacacgatcaagtttaacgccagcacgtgagtatgcatattgtactaaaccagaacagtcaagaccaacaccaggtgttgagccgccccatacataaggtgtaccaatttgtgacaatgctgcattgataactgtttgagcattaccgcttgtttgagcattaccgcttgtttgagcaggagcttttggtgtttgggtaggtgttgttgctgttgtattagaacttgaagctgtgtttattgtgttttgagtttgtgtttgagttgttgattgttgttgagcaggagcactttgttgtgttgaagctgattgtgcaacaggtgctactgaagtgctagtttgtgatgtttgagtttgtgtttgaacttgagttgcttggcttgttgatgttgaagttgcaactgatgattgttgttgagcaggtgcagtaggtgttgttgatgattgtgaagcagcaggtgctggttgggttgttgatgtttgagcagctgattcagaagttgcagttgtagcagcaggtgttgtcgtggttgttgaagctgctggtgttgtagcagttgttgttgcaactggtgtaacagctggggcatcagtaatcggtgtgacgccggctaaactagggttgtttaaaacaacgtagctagaaggtacccaacctttgttttctaattgataccatgtaacgccgttagctgttttagaagcaatgacgttttgtgccttaccataagttaagtaagcgccagttggttgagcagcagttgtgtttgtccagattgttgttgcaccagacttgtagttaactgtgatcgtgtctttagcagcaggagcagcagttgtagctgctggtgttgttgcacctgttttgacgaattcgccggcaacccattcgttatcagctaattgataccatgtttgaccgtaaacttgttttgtatttttgattgtaacgttttggttgtttgttaagtaacgtgtaggtttttgaccaacttcaggacttgtccaaatagttgtagcaccgtctgcgtagttaactgtccctgtagtagcagcttgagcttcattagcttggatacccattaatgcaagaccagctaaaccaacgataccagatgataaataagtcattttttgttttttcattgtgattgaagtgctcctttgaagtttgtttttagacgtttaagtttgttttaatttatcgtacccaataagcatatcattctaacgtgacaaacatgttacataatagttagcacggtgttacaagtttcttaagatgtcaggatttaaaagactaattggcagattatgttaaaaaggtagcgtttaataacgatcttttataaataatgttcgtattttactaaaaaatagaggctattgaaatatttcaatagcctctatttatgttacagctagattaaattattgtaacaaagcatcagattgtgattgggttgaaatctggttatcgcttgtcgatgactctgattgagtatcggaagtgttattatttgtagtcacattaccattgttattgccggtattactacttgatgaggtactttgcggcgtagtgtttgaataacttgttggttgcgtataattgttgttagttgtcgtttggttggttgtagcagccgtgttatcgactgtattatcagttgattgcgttgtttgatcagtagttgttgtgtcagttgctgagctactttggctagtagccgttgatgaggcactagcgctataactatcaaactgggccttagcttccttgatcagttttaagtagcgttctttaaatttcttgtgagttgttttttcaacaagcgctttagagtaggtgaaatcttcagttgttaaagtggcgggaattgccgtgtggtcgctgttggtaaagaggttatcaacagcggtcattgctgcttgttgggccttagcctctttataggcggctaattttttggcatcattggcataatctgattctgcaccaagttgcaagccatctttgacaatcccatcggcatcgaagaaatcgctatctttggtctttttagtttttttcttagttttttcgacgggagcgccagtatcaattcgttttaaatctttttgagccgctttaaaagcggtttttgatttactggatagggcactcatatagagattatctgaaattttatgatctaatttttgggctgattcgataatctcgtttttcttgttagcggttaattttgcgggctttttatgatcggcatcagcgtaaagttggttgaccttttgaacatactgctcgatttgatcctcagtcttagttgcggcggcagggaccgtcgttttattctgacaaccggctagaatcacgaaacaactagccatgagcatcaacagaacgtgtgttaattttttcattttgaaaccaccttattgttaggatacttaatctataatatatcatgaaaagattgctcaaacataaattaatgaagaaactctaatttttaagtgacttgatgattgttttagagaatcttatgaatatgggtatacattcgaccaaggcgggcgtacactaatagtatctttatgagaataatttaatgttctctaaatcaaaaggagcgatagacatggaatcagcttgtacaacaattttagttggtaaaaaagcatcacttgacggctcgacaatgattgcccgcaatgatgatacttttatgcccttaaccccccaacgtttctatatgaatccggcagttaaaggccgtaagggtgaaaaaattaaatcttggttgaacggttttgaagcgactttaccagaagacggttatcgctggccagcggtgcccaatgtggattacaagaacaaaggttattatgacgaaagtagtattaatgaagttaacgttgcgatgagttgtactgaaagtacgtatggcaacgaaaagtcattagcctacgatccattggttaaagacggcttagacgaagattgtatgcaagcaatggtcgcaccctacattaactcagcacgtgaaggggtcagctacctcggtaacttgatcaaacaatacggttcacctgcgggcaacagtgtcttgtttagtgatcatgatgaagtttggtatatggaaattgttactggtcatctttggttagcacaacgaattccagatgatgggtatgccgtagcggcaaaccaagtggcgattcaacaagttgatttcagcgataaggataacttcatgtgggctgaagggattcaagaatatgttgaaaaacatcacttaaatccagataagacgggctggaacttccgtcatatcttcggcacaatgaacgaaaaagatcgccactacaatacacctcgtgtctggtacgcacatcacttatttgattcagaatttgacatgtcacctgaatcagctgatctacctttcattcgcaagattgaacataagattagtgttgaagacattgaaatgttacttggttcacattataacgaaacagaattcgatccaatgggtcacggcgctgatgctgacaagtatcgttaccgtccaattggcttaaacagaacacaaaatgcgcatatcttacaattgcgcaacgatgtgcctaaagaacaagctgcgattatgtggattactttagggatgccaacttacacaccatttattcccttctttacaaatgccaatgatacagatcctagcttcagtgaaacaccaatgaaatgggatattaatagtgcttattggatgtaccggacaatttcagtcttggttgaaggtcactatagccaacatattcaaggtaacgttgactatctaacaagctgtaaacaagaattacggacaatgttggatagtattgaagaagaagctaagaattatcaaggcgaagcactaacaaaatatttgacagaacaaaattatttgattgttaacacgatgaaagataaggccatgggcatgattggcgaactcgtcatgtcaggaattaatttatctaaattgacattcaatatggatcgcaatctataataggtttgaaaggagtgaactactaacgatagttagtagtttgctctttttttacaataacgccaaaataatagaaattttaataaaaaagttgcagatagttatccttgcaataattaacgttacaatataattgttaatcattaagtgactttgtactaaattaatgaaaacaggtggtttcttttttgaaagaatatgctactatggttgttagcaatcaaattaaaaccattaattattttcgaccctcatcacttgtatttataaaaaggagattcaattatgtcatcaaagattacggggaagtattctgaagactgggaagttatcacccatctatcgcttatctatcgttgggttatcagcaatcttagcgattttgtcagtggggaaagtttgaactacaaagtgtcatttgatcaattcttgatcatgtacgaaatcgccactaatgacgatttaacgggtagcaaattagctaaaacaatgagtgttagtcgttctgcaatctcacgtcaatgtcgtttacttaaagaaaacggctacgttgttgaagaacacttacaatcagatcaacgggttaaattcttaagtttaaccaaacaaggtcaagatgttttagatcgtttagtgagccgttatgtacaaaagtatcaagaaatcgaaacacaaatgggtcgtgaaaaaatcgatggtttaattcaatttattgatcaattctatttagatgttattgaaccaagtaactaccaagataacaaaatggggcgttcattcttggaaaaggttcaaaatatccaatcagacgacaaactcgcaaaataataaaaacgatagggatcagccgctaaattcatttttggtgggtggtccctttttatgtgttattaaatcaatgcttgtaacttcttatgaaattgcttacaattgtggcatgaaggaattacttatagattgggagacgataacatggaaaaaattctagcaattaacgcgggcagttcaacattaaaatggcaattatttgaaatgcccagtgaaacagttatcgccaaagggatgattgatcgcttagggttatctgattcagtgtttaccgctaaatatggtgacaatcaaaaatttaaagaagtccaagatgtgaccactcatgaaatggcagcaacactcctactcactcgcttgaaggaattaggaattgtcagtcatttggatgaagttacgggtgttggccatcgagttgttgggggcggtgaagctttcagtgactcaatggtcattaatccagtggcattggatgaaattaatcgtttggcagaatatgcaccattgcataatccaacacaggcctattacatcaaaatctttacaaccttattgccaggtgtaccacaagtagcggtttttgacacctctttttacagtaccttggcacctgaaaattatttatacagtattccacaagaatattatcaaaaatatggcgcaagaaaatacggtgctcatgggacaagtcaccgttacgttgcccatcgtgccgctgaaatcttagaaacaccgctagaatcacaaaaaatgatcacgcttcatttaggaagcggggcttcaatcactgcggtccaagatggccatgccgttgatacttcaatgggctttacaccacttgccgggattaccatggggacacgttctggtgatatcgatgtttctctagtcgctttcttagcgaagaaattagaaattacgatgcccgaaatgattgatattttaaatcacaaatcaggtttattaggcatttcagaactttcaccagatatgcgtgatttggaagaaacggctgctacacggccacaatcagcgttggcattatcgatttttgtcaatcgtgttgttaagtacgtgggttcatacgttgctttaatgaacggtattgatacgttagttttcacggctggtagtggtgaaaacgggagcgaattacgagcagatatttgtaaacagcttgcttgttttggtgtaaaattggatgaagagaaaaataatgtccgcagtcaagaacggattattagtgctgatgattctaaggtcaaagttttaattgtaccgacgaacgaagaattaatgattgccagagatgtgatgcggttaaaataatggagtgattgaagatggcgcaaaaaccattatctgaatttgaagttgatattccaagattaagtgcgcgacttgagacacggccaaccgtgaaaacttttttcgacgccttaacacctgggtaccaacgggaatgggcgcgctatgtttacggcgctaaggctgaagagacgcaacaacgacattatgatgatatgctgatgattttagaagcaggttataagtcaaaacgcggttattcacaagctaagaaaaaataaatttaaaaaagattaattgggcggaaacggtgcctgattaatctttttttatgtttaggatgtaaatcgttttcaaaaagggttgaattatcgaaatgggtcatttataataatcatcaagatagttagtaaaacgttttactaattgattaaataggcttggaggaaattataatgaacgctgtaaatatcttaatcggcttaatgccgatgattggctgggggattttcccagttattgttggtaaaattggtggtaaaccagcgagtcaaatcctggggacaactattgggacattaattctagcaattgtcgttgccattttccgtgggacaccaattcctgaaacgaaaacttttattttctgtttaatttcaggtgcatgttgggcactggcacaaattattactttccacgttttcgaaacaatgggcgtttctagaacaatgccgattacaaccggctttcaattagttggggcatctttatggggtgtcttcgttctaggtaactggtcaagttcacaatcaaaattaatcggttttacagcgattgcattaattatcatcggcgtttatctcaccgcttggagcgaagataaatcaagtgctagcaagagtggtgccgttaagggcgtcttgttattattagtcggtgaattaggttacttaggttattcagcctttccacaagcagtcagcgctgatggcttccaaggtttcttaccacaagccattgggatgacaattgtcgggattatcttcggcgtaacacaaactaaaaaagattataaaccatttaaagaagcaacttcatataagaacatcttcagtgggttcttcttcgcttttgcggcattaacttacttgatttcagcacaaccatctgtcaacggtttagcaactggttttgttttatcacaaacaagtgttatctttgcgacaatcggtgggatttacatcttaaaagaaaagaaatcgaaaaaagaaatgatcgccgtaatggttggtttattattagtcttagtggcaggttctgtcacagcatttattaaataaagataagggagattggtgacatgagaaaaacaaaggtgattaacacacaaatttcgagcgttatttcagatatgggacatttcgatacattaagtattggggatgctggcatgccagtaccagctggtacgaagaagattgatgtggccattgaaaatggtgtaccgagttttattcaagttttaacaaatatcttaagtgaattagaagtgcaaaaagtttacttagcaaatgaaattaaaacagcaaatccagaacaattagaggcgattaaagctttaattggggagacaccaatcgaatttattaatcattcacaaatgaaacaagacttaaataaggccaaagcatttgtcagaacaggtgagatgacaccttattccaacattattttagaaagtggcgttgtattttaacaaccaggagggtatttaaatgaaaaaagtaatcgtattaggttcaaccaatgtcgacacaattttaaacgttcagcgttttccacaacctggcgaaactttagcaatggatggccgcgcagttgctggtggtggtaaaggcgctaaccaagcaatcgcagctgttcgttcaggtgcccaaacggctttcattagtaaggttggtaaagaaggtgccgctgatttcatgctcgacacattcaaaaaagacggcatgaacgtcgatcacgttcgttgttcagaaacagctgggacaggccaagcttatatcatggttgatgctcacggccaaaatagtatcttaatttacggtggcgctaaccaagacgtgactgttgaagatatccacgaagcagaagcagctattaaagaagctgaccggattgtggcgcaattcgaagtaccagtacctgccattatcgaagccttcaagattgcgcgttcaaacggggttcaaacaattttgaatccagcacctgctatcaagaatattccagctgaattattagcagtgacggacatgattgtccctaacgaaaccgaagcagaaatcatcactgggattaaagtcactgacgaagcttcaatgaaggccaacgctgaagcaatgttcaaattaggcatcaaagtggtgatcatcactgttggttctaaaggttcattctatgcaacaccaactgcaactggctttgtgcctgcctttaaagtgaaagcagttgatacaacagctgctggtgatactttcatcggtgcgttaagtacaaaactcgaattggattacagcaatatcgaagccgcaatgacttatgccaataaggcttcatcaattgccgtgcaaactaaaggtgcacaaaattcaattccatatgaaaaggatattcagttataatagattagaaggcgctcatggcttagtcggctatgggcgtttttaaatgatagagggtttttcaatgggggaagttaacgtggtacgaaaagtaacgattaaagatgtcgctgccttggcccaaacatcggtcacaactgtttcgctaatcttaaataataaagggcagcggtttagcgctgagacgattgcgcgggtgagagcagcacgtgaaaaactcagctacgaaccggattattttgcccagaacatggttaataaagaaaccaaaacaattgcggttttagtaccggatatcaataatcccttctttagtcagtttattcaaggggtcgaagaagtcgcctatcagtatgattttattccgctgatttatagtgcgggtcagaataatcagaaggtcaattactatctgaaagagttggttcggcggaatgtcgatggctttattttagcggtctcgcatattgaagaagagacactagaggggcatctgaaacaacgtaaaataccgtatattctgttggatcaatccgaaaagcaacatcaaagtgatgagatctctgtagcggatacggaaggtggccgaatggcggctaattacctgattgaaaaaggccatcgtcaaattgggattgtgttgcctgaacagcgcgcttggaatatcgagcagcggtttattggttaccaagcggctttggttagtcatcaaatcacggttaatccgaactggcaaataacgacgccgttatctaaacaaggtgggtatcaagtagcccaacaggtaattgatagtggcgtcactgctatctttgccgtcaatgatgagctggcgataggtttagcacgtgggttagctgaactaggtcatgcggtaccagagtcaatttcgattattggttacgatgatattgattggtgcgagtacgtgacaccgcggttaacgaccatcaaacaacctattttagcgttgggccaagaagcgacccggttattgttgaaccgaatcgaaaaaccaacgttagggatgcaacaaaaaatgctaccagttgaattggttgaacgagatagtgttcaagcacaataaaaattaaattaagcacccaaaagtacgggctacacgaggcttggcgattcgccaaccgaatgtgggccgtcttttttgtggtttgtgaaaaaaagacttgcaaatgtgtcggaaagaactatacttaataagtcttaaagacctgtcgaaaagactgattgaagagagaggttatgaacttatgtatgaattgctgatgttatcagccttaatgagtcggaatatgtcgggttataaattgcggattatcttggaaaatgcaatgttacctcgtcgaaaaatttcaaatggcgttttgtacccgctattagataaattggaaagcaaaggctgcattgggtttgatgaagctgatcaagattcgcgtggtacgaagattgcacatatcactgaagaaggccggcgttactttgctgaattaatggctaaaccagtcgcccacgatgcgaagtgggatgatgcttatcggtttaagatgcgtgggatgcactacatcgattccgaagaacagatcagtattttacaagattaccgcgatgagttagctgaagatttacacgtctatatgggtgtcaaaaaccatctaacagatttacgggatgaagaggggaccgataccaattattatcagtggcaggttcgctcaatggattttgtaagcacaacgcttaaagcaaagatcgactggctggaagcacaaataagagagatcgagaaaatggagatagtaaaatgaaaaaaacaacaaatcgttggatagcgctagtcgctatgagtctaggggtctttatgggactactagatgtgaccgtcgttaatgtggctttgccaagtatggcggttgattttaaaacaacttttagtaacttgcaatgggtattgaacgcctacacgttaatgtatgcggtcagcttgttaattgtttccaaattaggggacatgttcgggcgtaagaaaattttcatcatgagtatgattttattcacggtagcttctgtcgttaacggactggcaccaaacttattagtattggatattggtcgtgcggttcaagcaattggtggctccggtatgatgagtttatcgatggcgctagtggcatcgaactttgaaggtcgcgaacgtgggactgcattgggaattttaggctccgtcattggtttttcaactgccattggacctttggttgggggcttcttagtcgaaaacttcggttggccatcaattttcttcgtcaacttaccagtcgggattatttcggtttacttagtgattcgtaatgttaaagaaacaccagcatatggtgcaggcgaatcaatcgattttatgggtatgattttgtcagcaatcggattattctctgggatttatgggttaattcaaaaagaacaacacatgcactgggcttggacagatatgcggattatgggttggttagtcgcttccgttttaattttagcgctcttcgtctttgttgaattgaaggcaaaagcaccaatgatgaacttgacgttactcacgaatcgccatttcgtaggcgttgtgattttagccttctcgttaggcgctgggatctttgccttggccgcttatcaaacgagtttgatgcaaaattacatgggctactcagccttttcaaccggtgtgcatcaattgccaatgagtttatggtcacttgttttgggaccatttacgggtgttctagggtataaatttggtaaaaaatggatgattgcttttgggtttacagtttcggcacttggtttattgatttttagacaagtgacaacgactgactttacttacatgcaactcttaccattgcttgcgctaactgggttagggaatgcaattatcaatccaatgatcaatacagcagcgatggataatattaacccgaaggaaattgggatggcatccggtttattgaatgttttccgtcaaatcgggattaccgttggtgtcgtgattcttggtttatcacaaacgaatgcctatgagagtagcttaagtgctggctttagtgggagttcaatgccaaaggctgcagcaactggtattcaccaagcattagtcgaagcgggcgccttttcagggcacgcagtcgcttggagtcaacaattagtgaaaacaccgtatgctgccaaggtgcaacaaatggtggtcacagcttttgataaagggatgattgctgttgtcacgacttcattagtcttaatggtgattgccattttagcagcactcttcttattaaaagaaacaaaaagtgtcgatcaaaaataaagatatagaaagaagtcttttggatgtcattaaatccgcaagaaagaaaagcaacgactcgtgaattacaggctaattttgctttaactggtctctctttagctgaagtagcgacagatttgggcactactgaagggaccagtcaaaacgtattgaatttggaaacacgacacatcaataatccgtggatattacgggcgtatttaattgaaaaattagaagggcaggggattcagcctgttccgttcagtcgcttagtgggtgatccagaagattattggtttttggatgccaatctaattcataacggccagattgaagcttagataaaaatgatttgcttggctaataagcagtattacccgggcaatatatcaattaaattgaagttcattattttctgaaaagataagactgtaaattgtgatggaaacagtgtaaaatggacagagtaaaaataaaaaaagtgaggttacttacacatggctaaattagtttttattcgtcacggacaaagtgaatggaacttatcaaaccaatttacaggttgggttgatgttaacttaagcgaagaaggcgtacgccaagctcaaaacgctggtgctttattgaaaaaagaaggcatcctttttgaccaagcttacacatcagtattgactcgtgccatcaagacattacactatgcacttgaaggttcagatcaattatggattcctgaaacaaaatcatggcgcttaaacgaacgtcattatggtgcattacaaggccaaaacaaagctgaagcagctgaaaaatggggcgacgaacaagtgcacgtatggcgtcgttcatacgatacacttcctccactattggatgcaaatgacgaaggttcagcagcaaatgaccgtcgttacgcacacttagatccaaaagctattcctggtggcgaaaacttgaaggttactttggaacgtgttatcccgttctgggaagacgaaattgctccaaaattaatcgacggccaaaacatcattgttgcagctcacggtaactcactacgcgctttaacaaaatacattgaaaacatctctgatgaagacatcatggacgttgaaatggcaacaggcgaaccagttgtttatgatttagacgaaaacttaaacgtagtaagcaagaagaaattaaactaatatagtgcggatggctgcgtttagcaactgagcattaataaaaatcaccttaatcttggttttaagattaaggtgatttttagattaagcggaagttgttgcaaccaggagcatggttcaaaagagtgctgaccaccctggtcagcttctgagtatagtgtagaataagcgcctaccttccgaactttggaagataggcgcttatttgtaactagacggaagaagctagggtgagaagcacgttttcgtttactcaaataggctagtcccgcaaaggactagcctatttttttaccacaattcaccgtatctttgtataggattgcatttgcaggtgctagaaccaatttaatctgcagcactagaagtattttgtgaggggacattacagtttgaccggtcacaagctaatattcttatagaggaaagccgcaatctgctcatacgagtcctgtcgtccattgctgatccaatcaacaatgacgctggcgtaaccactcgaatggtaggcaatgtagtattgcatttcatggccattgaatggcaaagattggtgtttagcagtcattaatgattgcatgactgctgcaatattttcatgtaatagtttctgctgctgagccctcaacagcatgttgatgaactctgaatgttgattaataaattgaaggtatcggacaatcgccgtttcataatcttttgtttctagagattcataagaaggtacttccgacatgatctgctgtagattgacgctgagcaaatcatacacattcttgtaatgacgatagaatgtcattcgagaaacgccagccaccttcgccagttcactaactgtgatgtccatgaaatcttttttttgaagtagtcgttgaagggcacctagtaaatactcttgtgtttgtttggtcgctgtagacattacaaaaactccttatgtgtcacatctagggtctagttggttgtatttgtttaaaagtcattctatactcaacaacataaatacaagttacaagtgtaacgcacataagaggagaatatcaatgacaaatcaaaaagttgtgattattacaggtgcatctaatggcatgggcgcggcggcaacgaaagtctttgcagatcatggatggattgtatatggtggtgcccgccgagttgggaaaattcctacgggtcaggatatccatgcactttcactggatgtcaccgatgatgaatcgattaggtcatttgctaagacagtactggaagagcaaaagcgcattgatgttctcattaataatgctgggtacggagagaatggccctgtagaggatacgccaactgagcatattcaccgccagtttgaaactaactttttcggcgcggttacattgacccaacttattttgccaaggatgcgacaacaaaggtttggcagaatcgttaatatttcttccattggtggtgatatctattcgccgttgggtgcatattaccacgccaccaaggcagcattacaacaatggagcgatactctggatattgaagttgagcaatttgggattcagtcagtcgtcgttcaacctggtggaacccaatcatcttggggatcagtcgcggttgagaatatctataagaatttgaagaaagatactgcctataagccattggtggcatatatggctgatgtgttgcgtgatgatgcaccaggaatgggcgcgtcagtagaagacttggccaatctcttttacagagcagctaccgatacaaaacccaagcgccgttatttcaacaattttcacgaccgcttaacggtcatgattgcgcgttcgttcccaggacgcttccggaagcaggtattaaaaggtttgaatcaaaataaaaagtgattaggactaatttaacgtttaatattcaggcatgtgaaaaatagatgttatggtgtttttgaccataacgcttttttgcttcatagaacttctcccatcatttagatgtcacgactggataataagcatttttataagtatgatgagtcatatagagtagatgggagtgacccgtaaaagatgaatcaggaggctatctatattaataatgagcaaatccctcaagaggccgttctatcgtgggaatataagcgattaaaagttaactacaaaaggctgaagcggattagcactggcgctatatctaatgactttaataaatggcaagctgaaagaaatatcgataaaatgcgcgaagcactcttaagcattaagatgaacttaggcatggctgatttgaaaagcaaactaagcaatcaatataaacttggcaatttaatctcggtgatagctgtcaaactttcttttggaagacgaaaatttagtgaagtcgatttttatatacccaaaagcggcatcaccattcaagaagttgctagtcagattgatgatatcatgctgataaatacgcaagcgcattttaaaattaacttaaatacgaatccagatcattatgttttaaaagggatgagtaacacgattcaagaggtactagaatttactggggggtcacctttgccgactaatttttatgcgcattatggtgatactgaagatttgaagtctgttctttcaaaaggatatgaagaacagttagtcggcacggcaagattagcgaatgggtttattattggcggtgtccgacaccaacttaaacaagcggaaaacggcataaggtttaaagccttggtcgagtttccagcaatgctgcccaactttatgattaaacaacacgagttacacctcgcttgtgagtttggccgttggcttgatgaaatatgataagttgaccaatttgtaaaacaaagggctatcaaatttagaaaataggccaacacctagagcgtgttggtctatttttatggccaatttgctcgtattgtttctagaatggaggcgatttggcgtttattatgggttaaatagtttgcgtaaattggcatcttggcctgttcatcactaattggaaccgtaattctatctaattgatgtggtgataattcgttgaagaaagcatccttttgtgagaggttggaagtgaaaaatggtaggcttgagtgcttaataatctcaatgaaggcggcgcggtcgtcttgatacataaattgcgcgttgggaatatcttgtttaatcatatcgctccaggggccgattgcgcgcatgacgacgaaactcatgccgcctaaatcttgaaagctaacggttgattggctagcaaacgtcgtgaattgatcgagattaatttgaagctgttcttgaccgaggtattgagattcgatggtcgtatcaaggatttcttgatttgaaaagattagggcaacttggtctgtctttagtgcattactaatttgatccaccgcaatgaattctttggtgatttgcacatcatcacggttaggcacgagggttagcggtccgggaatcgttgcgccaattatcgtaaagtgctgaccgcgatcgaaattttgaattttagtcagcatcgtttgactagtcgtcaaaagttgttcagcttctcgagcggcaagctcgcctgttggtgtcagtttaatgcgattagcttgacggtcaaacagctggacaccaaaatcctcttccaacttttgcatgccgcgtgtgacggatggctgggtgatgttcaaagcagcagcagttttcgtgagggggccagtcttggcgaaggtcgtcaattgttctaataaatattaatctaacattcgctgttctccttagtatacgtttaatgtatactagcatgttttttaagtaattttcaagtgagccactgcgcactatactaaagccatcaattagaaaaagaggttatcaatgatggatatggtgcaattaaataatggcgtacaaatgccacaattaggtttcggtgtttttcaaatgacggatttagcagaatgtgaacaagcagtggttgatgcgattgcatcagggtaccgtttgattgatacagcggcagcttaccataatgaagccgcagttggccgggccattaaacgtagcggcgtggcgcgcgaagaactattcattacttcgaaactctgggtatcagatgcgagctatgaacgtgctaaaaaagggattgaccaatcactccaaaatttaggcgttgattatttagatctttacttacttcaccaaccttttggcgatgtgattggggcatggcgggctctagaagaagcatacaaagccggcaagattcgcgcaatcggcgtttctaatttctatgccgatcaacttaaaaatttaatcttatcaaccgatgtcaaaccagtgattaaccaaattgaagttaacccttggtatcaagaacactcagaagtggcttttgcacaagcggaagagattcaagttgaagcttgggcaccatttgcagaaggcaaatacaatatttttactgatgaacgaattgcggcaattggcgagcgttacggtaaatcaaacggacaagtcatcttaagatggttacttcaacgcggcattgtggtgattccgaagtctgtgcaccaaaatcggatggccgaaaatatcaatgtctttgattttgaattaaccacagccgaaatggcaacgatgaatgatttggacaaaggcgaaagtcaatttttcgatcatcgtgatccagcggcaattgaacaaatttttgggacgagcttagcagcgctaaaggagaataaataatatgacaaatgtattaattattggggccggtggtcaaattccagcgattttaattccccgtttacaagcagaaccaactttaaagctcacactttttgggagtgatgccgctaatttaccttatgacaatgtcactaaggtctctggcgatgcgagtcaactcgacgatttaattaatgtgatgcaaaaccaagatgcgatttatatgaactttgataacttagcgattaccaaaatcgtcatcgaagcgatgcacgaaaccggtgttaaacggattatccaagcaggtgttttaagtgtctacggcgaagtcgcagaaccttttgccacttggaatagtaaaatgacgggcggttcggtggcgcaacatcgcggcaatgaagcccttgaagcaagtgatctcgactacacttatatgcgaatgacttggttgtatgacgctaaacgcactgattacgtggctagtcctaaaggggaaccattcttaggcgcgcaaatcagtcgttacgctatcgctcaattcgttgttgataatttgaccggtaaacgcaatgatgtccgcgcaagtattgggttatgggaacccggctcagaaaataaagccaaaccagatttttattaatcaggagggtgtcaattgaaaccattaatcgtttattattcacgtactgggaacacaaaggcagttgcgaaattgattcacgcgcaagttggtggtgatttagtggcacttgaaacacaggaaaagcggcccaagaattatcgcgcggaggttgatctgaatgcatgtgaacaattacaaaatcaattaccaccattaaaaacaaatattccggattttgaacagtatgactgaatctttatcggtgcccccacttggaacatggcactgccccaagcagtgctgacattcctagcgacgtatgatttcaccgacaaaacaatcatcccgtttaatacacacggcggttatggcgccgggcaaatggttgcacagattcaagctgctgtcggcgatgcgctagtcttgccaatcttatcggttgctggtggccaagaaaccaacggccagttactagcaattgaaggtccaactaaagcagccgtcgctaaagaagtgacgacctggttacaaaaaagcggtcttttggcctaaaagaggttactaatataagcgattttccgccattttttattgatttaggaattaaatcagtccaattaaggtcagttcataaagaactgacctatttttttgcccaaatagccgatattcactgtggctttaaataataaagtagggataatttatttaaagacgtttctatcaaggtataaagcagtttatagattgtgtacagtttaatagtgagaaatcgacttgcaatcattgcccaagtaatatactatttacatattgttactgtgatgtatttttcttgatgttaaatattaacggagttgataaaggcttgatagatgtgcttggagcagtgctatttttgctggaatgttacagtttgagtaccaattaattatttagataacggagggctatttttgaaaaaattagtaacctggttaatgttgatactgatattaataagttctgtaattattaatgagaacgttgtcaacgcagtccaaagacaggataattcatcagaaatcaaggtgccaacagattcaaaaacaagtagtcactcagaacaatcagtgagtacccaatccaaatctgaatctaagtctgaatctaaaacgacgtcatctgaaaagtcttcttctgagacgacaaagcagtcatcgagtagtcatcgagataagtctgtgattcagaatcaatcacgagatacaataatgccgacagctactattgatgatggcgtgacaggttggcaaccggcaaagcaaacaacgattgcaagtattgatattgataaagcggctaataaaagccttaattatacttttggtaatagtgatgggaccttaaagtttgatcaaggaaatggtgggataataacgaataacatgccgccaagaatgaacgttttcattaaggataatggcaagattgtcgagtcttcattcaaatcaacatctgggatgggggctcgtatgactattcactcttaaccactagaagttccacggcaccaacgattaaaaccacatcgacatcggcacagggatcactgacaggtgtgcaatattatcaagccaaagacgccaaagggcagacaattttaaaaatggtggggcaatatacaaccatagtggggcgtgtccccagtttcacacttgagtatctattacggccgtcactagaaaaaccatctgttcaacaggaactatatatttataatgcgacatcggcagcaattgatggcgggatcttttttgctaaagatacttcgttaaatggtaacgatggcgtaccagtttctgcgcaagggaataacgctgggatgtacattgccgatggtaaatataaactattccttaatatgggtgttgaggatggtccagccaaatttaacgcgatgaattatcaccgaaatggtggatataacttatctgattatgcaatgaatgattattcgccagccaactttgatggtacgggtatcaaagttaaaaatctaaaagaaggggctactgtttattcaggaagtgattctgcgtatagcgctaagtggaattggcaaacttttcagccagataccgtttatcattttagaaatgatttagggattgcgactgcgggcttggttgtcccagaagcggcagagaactataaaaataaaacgacaagtgatcaaaaaaatcacgttcaagataatattactatcgaaatgaaagcgcataattcaggctatagtagtgaatggaaagatattaacgtaacgtcaaaaataccagatgaactggatattgatcctagtacaattaaagtaactctgaataatggcgatcaagtagcaattgatgctagtaagtataaccaaacgactagaatgttaacggttagattacttaaaaatttgtccgaaaatgagtggtactggcaatttcgatacagctacagcgaatacgaaaatccctgttgaggttgaacctgtcgaaattgaaaagaaagttttaaatgaaactgaaaaagaaacgacgtaccaaaaggcgacggtcgggcatgtaaatgatgttcttgattaccaagtgaagttaacagtcagcagtaacggagctgatatgtctaacggtgtcttggccgatgacctagctaaggaagggttaaaattagtgccgggctctgttaaattgacatatagcgataagacagttgaaaccccagcagatgttaaacagattaatttgaaaaaaatgacacctggacagaatgtagtattaacctataaggctaaagacaaagaaggtgttgtgataggcacagtgcttaaaaatattgttttatattctggggaacaagctaatcagggtgttatgaacgggcaagctgacgcgtcagtaacgattgaaaagacgaagaatagtgacgttcactttagctatattgatcgtgaaacggggcagcagattactaacgaagtcgttgcaactgggccaattgatgccaaaatatcagcattaaaagcaactgatattagcgatgggcaagatcctaataagattcggcccgcctacattgaaggttatacgccagttgattttacgacggcaactgatttaaacgctgcggtctatgcggatattaaagatgttgacccagtaattgaagaaaaatcggtgacctatacctttagatatgaaaaaacgcgcttagcgattacggcgttaccaagtaaactgaattttggtaaattcgacgatacgcaaagtgaacggacgttttatttgccggcacaaattgagaaaccaactgatgaaaaaacaccatatggcattgaaatctctgattattggggcattaagggctggacgttgagtgttgcacaggaacaacaatttcatggcagtgccacgatagattcaaaggaacaagcagttgagctgtccggcgcacaactccagtttaataacgcaacattgagcacgaatacggaaggtaataagtctgtttcgaattcgcaggataaagtagtaactaaatcaaactttaacttggtacccggagctgagccgttagaattagttgaatacgaacgaaaaggccagtaccttaatcaagacggcgacaataaaggcggggtcagttatgatatccctggctattcagttcataaatatcaatttggtgacgcaagaacggctgattacagtattggcctgcatgtcccagaaacgactgaacgttaccgtacagaatacacatcaacattgaagtggcatttaacggctgcgccataaagtaacgtattgttggtttaaaagattctcttaagcaaaaaagactaatcccaaaagggaattagtcttttttttattgaccatgttgctttccacgtacaacgtgatcagcgtgttctagtacttcgccgctgatgtctaaaatatggggatcatctagtttataatagcttaatttaccgtgctttgtggcacttactaattggtgatcgcgcagcattgctagttggtgagaaacgatagattgttcaatttgcaatagttcgccaagttcgccaacgttgcattcgcgctgtgccaatatgtgcaacaattggagtcgagtcggattactaagtaattttaaaatccgttttgattcttccaggttacgttcaggaattaaattaacggtatttagcggaatagcttcattttttaacatgtcttctccttcatatgttattatcaacatgtgagattaaataaattgctttagagggggaaataaagtgcaaactgcaatattaactggcattacagcctatatttcgacgagcattgattacttaattattttaatggttatttttggatccgtaaaccgtaaggaacggtggcttgtttattggggggatttgctagggacaagtgtcttagttgctgcaagcttagtgatggcattcattctaggttttgtaccccaagaatggctattaggattattaggtattataccggttttgatgggcctacggttattaatcagcggagaaagtgacgatgatgaagtcgttgagagtcagatgaaaaaacggcgcaatattattatgaatgtcgcaatcattacgattgcaacgtgtggtgccgataatatcgggatttatgtgccaatttttgcccaatcaacagttcaaacattggcggttatattgattactttcttcttcatgttaagtcttttttgctatgttggctacttactgattaaaattccgaaggtcgctgaaattctggaacgatatgggatgtatatcaccgccattgtttatatcggcttgggattatatattatgtttgaaagtggcaccgtccaacacttagttaaaatgttaggctaatttaggaatatggatcgtggtgtttttcagcctggatgcctatttttttattttaaatggggcttagtagtatatactgtaaattatcgcaatacttattttgaaaatgaaggagcgctatatggatctgctaatttcgacattagcgatcgcgattgcggtcgcttttagtaacattattgctcggtataccaaacacatagctgggacttacattaatttattgatgggcgttattgtcgcggtaattccctggacgaaccatttagtgctgggctttaataatgaagtcttcatgattttaattttagcaccactattatttttcgaaggccagacaacgccgctattaatggttggcaaaaaagtgaaaagtattatgggggtcgcagttatcctcgccgtggtttcggcaattgcagcaactgttatcacgagtcgtctgttgttattgagtttaccggtcgcgttaattattgtcgccattgcaaccccaaccgatgcaaccgcctttgatgccgtggttgaagggcgtaaaatccctcaaccaatcaggaatatattaaaaatggaatcgttgttcaatgatgcaacgggcattattttattacaagcaggaatcttgtggttaacgacgggccatttatcattttggcctttatcgtgatggcgtttcggcagtattttgtgcggtcgacaagcaatgtgatttcgtcacagaccttattttatttattaacgccttttttgatttactttttggcagaaaagatcgaggtttccggcattatcgcagttgtaacagcggggctggttcataatagcgaagccaatcgcagccgtttttcatcgccgcggcaaatgcatttggggattcaattgattaatctgatgacggaagttttaaacagtgcggtctttgtgattctcgggattagtttggcaagaatcctagtcagtcactcacaaatcttatttgggtcacttacttggttgatcgttggcttggttgtgtacgggttactgttaatctgtcgctatctttacgcacgactctttgtgagtgaccgtcggcgcaaaacggcgtggctattttcattaggtggcgtgcacgggggcagtgacactggcgatgacattttcgattgctaatcaaattagcctgcagttatttaatttcatcatcgttgtggaaactgtggttattattttaagtatgttagtgcccacgattttatttaagttcttactgttgattgatggagatgcggaaattcgcacgacagaattggcacgaatccgtcatgatatggttacaaaagggattgaatcgcttgaagcaatggcgttaccccccgctgttaaggcaattgtcatttatgatttacgggatcaaattcggaaaaatacattagggtcgttttttgaacaatggcacgcttttacggccaataaagcgggattgaccaagctgcaaggcggcgaacaacgccgcgcattaatgcatgctctggatgctgaacgggactacttatttcagttggaaaaaaatcatttagcgagttccgatgatattgatgaaatttacagtgaacttttattagcagaatcgctcgttttagacccaagaaatcagatgttgtaaaaacaggggtttctcatcaagcgcattagattcttaaataaccctcggcagattgccgagggttatttttttagagattcagaatttgttgaataaaccctttaacatcggcggccttgattgtcgttgtatttgtcatccaaccggcaacgatgccactgatggcgcggtaaactaactcatcgttgaccggtgttcggtcaagcagggtaatctgaacgttattggccacttaaaaaaataattgcttgaataagaaatcgaattcttccttataaacgctaaagtgaacgaagaatgcgaggtcttgatcaagtgtattaatgacgagctctaagagttcagctggatcggtgattgattggtaactagtgggaaagcgggtcagggtggctgctagaatggcatcgccgagactcggaaagtgccggtaaaaggtggttcgcgaaacgtgcgcttgtttaatgatgtgactaacggacgcccgggtgtcgctgagcatgagtgcgacggttgcttcgataatcttttgacgtgtttgttccccttttgtcatctaataacctcctaaaaacggtacacatctgtcattttgtgtcttccttccattctatcagctatttatactgagtagcatattaaatttaagaggaggactactaatgacgaatcgtttctttactaaaattagtcaaattatccataacaacccaatcaaagtcatcattaccgtcgtgcttttaacgattggcttagcattcggcttacccaatattcaaatgaatatgggtaatgaagtattcgtggatacgaattcgcaagtttacaaagacaccaaaacctatcaggaaaacttcggtggcggttccgcgtatgtactcatttccggggatcaggatcagattgtgacccacactacgatgaagaaagtggcggccctagaaaataaaattaacaaggtcgatcatatccgcagtagcacgagtgtcgtttcgctactcaatcaggaattggagagcaatgccgctagcacgatgggcggaaatgccaagggctctgacaagctccaaaaagatttaatggcgaacttaacaacgtctcaaaagacggcgttgcagactaagttacaagcgagtttaacacctgagcaacaacaacaaatggggcaatacgggctctcattattaacgccacaacaaaaaatggctgcggcacaagctggcaatcaatcgccagcaactttgatgaaacaattagacaaaacgcaacaagcaaaggttcaacaatatctgttcacgattttaaatcaagaccaacaacaaatgcttcaaaaacaaatgttggctgatttgccaaaagtggaatacatgtcaacggcattgctacgtgatttaatgcttgatagcaagggacatgtgcgttcacaattatccgcattattacctaaaaatggacagaacttgttaatcatggccaatatggcagccaaaacagatatgacaactaatgtccaagtcgttcatgatgtgtggcacgatattaagcaagctggtttccaatcagaccttaaagtgcgcttagctgaaaatccagtcatcatgggtgggattcaaccgctcgttatgaaaacaatggcgacgatgttagttttagctgttatcattatggttgttgttttgttcgtcgtcttcccagttcgtcgacgtctattatcactatgttatgtgttactaggcttaatttggactttcgggattatgggttggttacacattgacttaaccttagcgacgatggcaaccttaccaatcattattggtttagggatcgatttcggggttcaattccataatcgctacgaggaagaattccacaaatcagcatcaggtgaacaggcgacaaaacgggcaattaagacgatgggccctgcggtcggggttgctttgatcgtgatggttttcagcttcttaacgatgttcctatcaaaagcaccaatgatgcaacaattcgggttaaccttagcaattggggttgccacagcttatgttgttgaattcttattaatgttctcaagctttgccttgttagatcgtaagagtaaaacaactgctaagccacaatcagcacctaaaacgtcaggcttagcaaaagcgttacggaaatacgcgcaattcgtcattaaacacgctaaaattttaacgctagtcgggatcattttagcagcaacaggttttagtgttgaaggacgaattccaattgaaacgaacttaaccaagttgattccacaagatatgcaagcactaaaggatacgaagtacttgcaaaaacaagtgggttcaaccacctatatgacttatcttgttaaagcagatgacgtccgcgataaagcggtcttggctaaaacaacacagttcgccaatcgcgagaatcataagtatcaagacatcgttggtgtcacgacattagatagtacttaccgtcaaatgggcggcacaccaaagcaacaaacacaaactgagattaacgaaggcattaaaacaattccggggactatccgagggacgatgttgagtaagaataaccattatacaatggttcaattcaaagtcgatagatccttaactaccggacaacaacggacattaatgcaccatattaatcgggatctcaaacaccatgcgacaacattagatgtgcacccagccggtgatagcgtcatgatgctcgttggggttggcaacatggtcgtcaaccatacgctaatcattctagcgggcttagcgattattgcggtcattttaattgctgtctatcgcgatctaaaaatggcattattgccaattttaccaattgcaattgttctaggattatcaccattgacgctccatctattgggcgaatcttataatccattaacgattgctttgagttccttagtgctaggtgtcggcacagaatttacaattttaattctcgaacggttcaaggaagagcaacaacttggtaagtccactgaagaggcgattattgttgctgttacaaacgttggccaagcgatcaccgcttcaggcttaactgttatcgggggctttgccgcattgatcttcacgagcttcccagtacttagctcattcgggttaatcaccgtcttggatacgttatattcactgattgcggccttaacaatcttaccagccatgattgtcatatcggataaatggtttggtggttcgaaaaataaagctaaatagtaatattgaaaaagactagtccgtcattgatgagctagtctttttttggacgcgatttaaccggtgttgtgtgggggattaattcgaatgctagactattaacatcgtgaaaaaatgcactacctatcaattttgaatatagttaaccactgaaacttcgtggcacttttcttgctagagtgctaaaaggtgttataatagaaccataagcaaaatgattaggttattgataagataactaatggtcatttaatgtttaaaataatggaggtgcagttgtatggcaaatatgtacggaaatgacccattttttaataatgatatggatgatatcttcaatcaagtttttagaagaatggggaattcagagtcagcgcgatatgtgattaacggacgagaattatcaccggatgagtttgctcagtatcgggcaactggtaaattacctaatcgagaaaaagaaattgaaattaagcaaaatggtgaacatgctcttaaaaaaggtggcattcttgaaaaattaggtcgaaacttaacccaggaagcacgggatggtttattagatcctgtcattggccggtataatgaaatccaagaaacagccgaaatattaagtcgccggactaaaaataatccaattctagttggtgatgcaggtgttgggaagaccgcggtggttgaaggattagcacaaggaattgtggctggaaaagtgcctgaaaccattaaagataaagaaatctactcaatcgatttgtcatcactagaagccgggacacaatatcggggctcgtttgaagaaaatattaaaaatttaattaaagaagtaaaagcagccgggaacgtcattctctttttcgatgaaattcatcagattttagggataggttcaaccggtggcgaagatggcggcaaagggttagctgatattatcaagccagctttatcacgtggtgaattgacggtcatcggtgcgacaacgcaagatgaatatcgcaatactattttgaaaaatgccgcgttagcaagacggttcaacgatgtgctggtgaatgaacctagcgcagcagatacggttaaaatcttgcaagggattaaaggtttgtacgaaaaacaccatcacattgaactaccagatgatgttttgaaagcggctgttgactattctgttcaatatattccacaacggacgttgccagataaggcaatcgatttattagatatgaccgccgctcatttagcagctaaacggccagaaacagataaagctaaattggcagctgaacttaaacagttagaagcggataaagccgaagctgtcgaggcggagaattatcaagctgctgaagatttaaaagtaaggattgagaagattaagacgcaattagaaaataatgatcagcatgcggccgtaatgattgcgactgttgatgatattgcgcaatctgttgaaagattaactgggattccagttgctaaaatggggagcaatgatattcaacgcttgaagaacttaggtcaacgcttaaaagataaggtcattggtcaagatgaagctgttgaaatggtagcgcgggctattcgcagaaatcgagcaggtttttcggaaggtaatcaaccaattgggagcttcttatttgttggtccaactggggttgggaaaactgaattagcaaaacaattagccttagatatgtttggtaacaaagaagcgattatccgtttggatatgagtgaatatgctgaccggacagctgtttctaaattgattgggacgacagccggttatgttggctatgacgataattccaatacattaaccgaacgcgttcgtcgtaacccatattcaattgtcttgtttgatgaaattgaaaaagctgatccacaagttttaacattattactacaagtgatggacgatggtcgcttaacggatggtcaagggaacgtgatcgactttaagaacacggtgattatcgcgacatctaatgccggttttggtaatgaaaaattaaccatgaacgaccaagaagatgctaagttattagataagttagcaccatacttcagaccagaattcttaaaccggtttaacgggattgttgaatttacgcatttaacgaaagctgacttgtcacaaattgtggatttaatcttaaccaacgttgaacaaacattagctaaaaaagaattaaccttagttgtttcaaaagaagctaaggattggttgatggaagaaggctacgatgaggcaatgggggctcgtccattaagacgggttattgaacaacaaatcagagataaggtcactgatttttacctcgatcatgcagatgtcaaagacttaaaggcagatttagttgatgatcagattgtcattcaagcggtcgactctgaaaactaaagattgaaaattttttatggaagaagtcctcaaggtgttgtcaaagaatatttcgaataagttacgccaagcaactggtgtgaatggcttattgtccttaatattaggtctattaatcctgtttttacccgggcaatcagccatgggtgtcacggtgatggtgggtgtcgtttttatcattatcgggctgttcgacatcctttctatttttaaagaagttgatgaaaatacatgggttcgactagggcacttgctcttaggccttttgtatctcattgttggaatctttgtatgcgttaatttagctgctagcgcaacctacttattcctactagtcgggatttttgtaggaatcacgtggttggtagaaggctttgtggaattgggaacagtacaattagcagtttctaaaggttggacaatattctctgccgttttgagtattattgcagggattattcttctgatgacaccgctttacggcgcagtcatgctttggacgttactaggcgccattttggtcgtccttggtatctttaaagtcgcgcattacttagcttggcaaaagtaatgggttagtatttagtgtaattagtaaaaacaaagttgggttgtaggagtttagtaatttactagacttctacaacccatttttaatttgtggcaaattacaagtttaatccgaacaagctcgaaaactttcaatggccgtctgttgatgatgcatttttaatggtcgttgattaattagttcaagtgctgataggatctcactaattgttaccgggctaaagttggcttttttttggaaaaaaccaacgtaaccgtcaattaaaatattcaccatggtaacaaggttcccatggtgaatatggatgacaaaaacagactttgatctgatcaatcctgttctaaggcctgataattggcaaactcttcaccataatcaacagtaatgaattttaatcagggaccgaaggcgccccataaatttgccaaagatggtgtttagggctttagccgttcgattaggggctttgatggcccatagaggtcgtgtcttacgttctacgaaagtaaccagacatgatcgtgactcgcctcgactagaaatcaccgtatctgctttccaatgaccaaaagccaattataagttgacgcagtacctaagttataagcatagaatttgccaacctcaaaaatataaaagcatgtttaattattaaaacgttattgcaatcaagaggtttaaagttttagacttgattttttataaaaggccaatagggcataccctagtggccttttttatttctgtgctatactaggaattacaggtgttcattagaactgtccaaaaggagaattggaaatggctaaaatcggttatgcgcgtgtgagttccaaggagcaacatttagatcgacagttagcggctttaaaaggcgttgataaattatttacggataaattaagtggggctaacactaatcggccagaactgcaaaagatgctcgcctatattcgtgagggtgatattgtcctagtcactgaattagatcgtttaggccgaaacaaccaggatttaactaagatcatgaacaccattcaaaataagggtgccaccctagatgtgttaaatttgccgtccatgacagggattgctgaccccaatttacgtcaactcatgaccaacctcattattgaactttataaataccaagctgaaagtgaacgtaagcggatcattgagcgtcagcaacaagggatttccctagccaaacagcagggcaaatatcatggtcgcaagcctcaatacgctgaagatgatccccgtttgttacatgcctttaaactttacctagcaggcatgagtgatgtggatgtttctcgaaaaacaggtattaaacgttcaacctttatcagatatagaaagaaatttgatgtccaaagatgatattaaatggtataagtatataatcaaagatggatacataagaggcagtaaaaaaagattagcaactattttaaatagactatgatcaaaaatagagttattcagatattggatgctttaattaatttccagaccaaataataagtaactagaaaaacgaaattgataaagcaaattgaaataatcatacggaggccaaggaattgctttctatttatatttgcagcgccatactcggtatttcaataggctcctatgtcaagaatccggacaagcccggaatctttcaatggcagtctgttgatgatgtatttttaatggtcgttgattaattagttcaagtgctgctaggatctcatcagtcgttacttggctaaaattggtctttttcgggaagaaccagcgtaaccgtctattaaaatattcattggaacctcgctcccatggtgaatatggatggcaaaaataaactttgatctgataatcctgttctaaggcctgataattggcaaactctttaccatgatcaacagtaatggattttacttggggaccgaaggcccccataaacttaccaaaggcggtgtttagagccttagccgttctattaggggctttgatggcccatagaagtcgggtcttacgttctacgaatgtaaccagacatgatcgtgactcacttcgactagaaagcaccgtatctacttcccaatgaccaaaagctaaccgttgattaacagttgttggccgttgttcgatggaagtcccacttgtaaatttcccacgattttcgctcactcggtgctggcggacattccgattgggtagatcagtcaatttgaaggggagccagccacgattaagccaattataaattgacgcagtgctcaagttataagcggccgcaatggtttctggtgaccaggttaatcgtaagtgattggtaattaaagtcgctaatgctgccgtcagcatcgaacgacgaccgcaattccgccttttgcaatctgcatcttgctgagctaattctagatcataaggtttaactcgatccaactcatagctaatcgtagctttggcgacgcctaaggcgtcagccattacttggtaagatttattcccctcattgaccagttgtgctagtgcgccacgttgaaaacgtgataaagtagatgtacccaaagtaatcactccctatattggttggaattagctactaccattgtaagtgattgctttgggctttttaatttctgttcggattaattatagaatttgccaaatataaacccagtgatatataatatattgtagccatggcgaattttgaaacaagtttaaatgacttgatcaaatctgcacgcctaggagggaagtgaaaaaattttggcgatgtttattaaattttataccccagtttacaattcaagtgcaacaccctgacgactagaccaaaaaggccatgaagacctattcttgttagtgctagctaaacaagaaagcaggaatcttcatgacccactctcagactaacacccacaagcattaccaacaactcagttttagcgaccgtgctacaattcaggcccttcaggctgctggtgacaccgcgaccgtgattgcacagaagcttcatcgcagtaaagcgacaatctcacgagaaatcacgcgtggatctgtaactcagcttgactcgaagcgtcactcgtatcaagtctatcttgcggaaactgcccaagccatgcacgaccgtaaacgcgatagaaccggtcactacgcctttcttaagaccggccgtgcgttcttcaaggctctcgccagggagcttactcgtaagccgcgcgtacacagcgttgatagcttcgtacacttctatcgcgaccagggcaaggcttgcccttcaacgacaactgtgtatcgctacatcgacgccgggctgcttgagctagacaacatgacacttcccaagaagctctgacgccgcatcaaaggctataagaacgcccacaagcgcaagaataagaagatatacggcgactcaatcgagttgcgtcctgcggccgtgaatgaccgcacaggcgtgggacattgggaaggcgacttggtcaaaggtattcgcttagctgatgagccagcattaatgacgctcacagaacggtacagccggactgtgatcatcgtcaagattcctgactatcatgcgggcacctgccttaaagccttgcaggacacgatcgacgactacggggccaaggaatttgagagtatcacttttgacaatggttccgagtttgccaagttatcagagattgttggaacctagatttacttcgcacatccgtactcgccttgggagcgtggcacaaacgagaacgccaatggactgcttagggaattcttcccgaaagggaagtctctcagagcagttaccctggttgaaattcaagcagtccaatccgcactgaaccatcgtcccagacgtattctgaactatcttcgcccatgcgattactaccgatgcatggcgtaacagcctagaccactatcaagaattcgttatcatcgttgcacttgacttgaaaattgaggattaaattttatagaacatttttagattgttaaaataaacttttgagaatgaagaaaaatgtttttagaagggagaattatgaaaaaaaatattcacaagaaactgcgcaacaaatttgttcatttcttgcgaattgctttattaatgggatcaattgttacgagttcacttttgcagccaattctgactgcttctgcagcaagtgacataacaccgcaatatacaaaggatagtagtggtacttcgccaacaaactcttggactattccgggacaaagcacagtaatcaaccatcaaggtggtgatactactaatggctgggacaagaacagcagttggaatggtgattcatctgatacatcaaaatcatatttgaagtttggaactgacacgagtaacccagattaccaaattcgtaagtatgctaaagagacttcaacacctgggttatatgatgtttatttaaatgttaaggggaatgaagttaaaaatattaaacccattgatattgtattggttattgatatgtcggggtcaatgaactcatctgtaaatggtgggaatgaccgagttggtgcgactcgtcaaggtattaaaaatttcttgaaaaccattaacgacgccggaattggtaagtatgttaatgtcggtgtagttggattttccagtccaggttatataagtagctcaggaacgctgtctgaaaatattgattcatctgataatcaggcacatataacgagaataaatgatttgttagctaacgactttaaaggtggaactttcacacaattaggaattcgtaccggtcaaaacatgcttgctggtgatagcaataatcataagaaaatgatgattatgttaactgatggtgttcctaccttttcatacaaggttactgggacaacgactattaatggcacagattatggtacgacatttggtacaaatcgagatgaaccaggttttacttctcagctgtggcaaatatatggacgaactagagtagcgtcagcatatacagtttctggtaaaactattaaggatacttggccagcaacactgggtgaatcattaattgcaaaaaaccaaggtaccgaattacatgcattgggcattcagttatccaaagatgtaggctatacgtataataatagcgacacatacttaactgatagccaagttcgtgatcggatgaagttattggcttctcctggtctgtatcaagatgccaacagtgcttcggatgttactacctacttaaataatcaggcgaaagatgtcctaagccagttcaataccgtcaaccaaggcactatttcagatccactaggttctcaatttatatacggtgatgacacaccgacagttaaaagtgttgggactagtgtcgttcagaatttaccaactgttaccaaatcaaatggaagtatctccgttagcaatatgaacctcggtaaagaccaagaagttcaaattcactatcaagttcatttgaataccgagtcggatgatttccaaccggattactggtatcagatgaatggtaaaacaaccttcacaccgacaaaggatagtaatgctgtcgaattcggggttccttctgctaaagcacctggaacggcgataaaggttaccaaacaatggcaagagttggttgattcatcgaagcgaccggatagtattaactttaatgtaacacggactgtgaacaaccaatcaactaattggcaagcttctggtattttgagtaaaagtgatgactggacaaaaacgtttaagcaattgagtaaaaataaccaatccgtttggttgccagcgtatgacaataatggcaatacatttaattaccaagtttctagtgaagctacggatagctatatttcaagcattactaacaaaacaaatgagtcaacaatcacaaatacacagtatggtttgattattgataagtatgcaagtaattcaacaaatacactcactggcgctgaatttattgtcaaatcagcagatggtaagcagtcctatacattaaaggacaatcagttacaacaactgtcaccaggtgattacacgattcaagaaattaaaagcccaactgggtatcaacttgattctacggtttatccaataacactatcgcaagatggaaaatggtcaagtagcggtcaaggtattaatgtgaaatcaccaaccacggatggtagcggctataaagatggtttttctattgcgactgataaatcaaacaatactgaaaagaataatgttgttagatttgtcaaaaatgatgctctcaaaaagtttgatctgacagttaataaagttgataaaactactggcaatgcgttaaaaggtgctaaattcacattaactgattctgctggcaaaacatcatcttataaagaaaccgatccaacagcaatgtttacttttgaaaatctttcatcaggcacatataccttgaaagagacaaaagcgcctgatggctacattactagtcaagacgttacaatagtaatttcagatgatggcaatgttaatgtaactaacaataatggcgattggaaatcaactttacaaaatgatgcaggtaataatcagattaccctaacggttaataataccaataaaactgtctttccatctactggtggatcaggtaatgaactttatttgattgtcggaggtgctttcatattaatctcggcacttgctggtggctattatgttttcagaattaagcgaggttatcagtcatgattaaaaaaatgatgatttctattgtaacaattctatcagctgttctgttaagttttagtctgtcacacaaaaatgtcgaggcggatgtatctagtccggtaacaataaggcttaaccatcaattaagtgtttatggttcagatccaatggcttatatgccgggcgcaaatgtcacttttaaattatacgatttaaccaatgattatcaaaaacatcaaaatgatgaaaattattttcaaacactaaaatcacttaatcaaggtattgaaaaatatattaaacaaaacaatgttcaattggttgagactgaaagaactgatgaaaatgggcaagcaatctttcatgctgataaaagcattggtaaagcctatttaatcgtccaagagcaggtgaaacattttgataataatgggttagtttatgaacaagtgaccgatccaattgcttttgtgccagctgatcaaaaagtgcgtcaagatattttaacaattgatactaagtctgcgattgttacaagagtgccgtattttttcaaatatggtcgaacattagatcaaaaagaaacgccattagctggggtgaaatttgtcttttatagattgaataataatcggagagaatatcttacaaacgacaataattggcaaattgtaactgatccgttacacgatagcgcaattaaaaaaatagtatctgatgagaatggcttagttgctttgaatgatactaaattagttgctggagaatattattttgaagaggttgcaacattaaaaaactttgaaatttcaaagttagctcagcaaattaaagtcaatattcctgaagttaacagtgtcaataatgttttgccaattactgttaatgggcaactattatcaaaagtttcagccgggactatgccagactatgttatgaaaaatgcgcaaccacgcatcttgaattaccaaaaaaagccgactgtactgccagctttaccagccacaggtgtggcgattggttctacttctgttattggtttggtgatggtgatattagttttgtttatgaaacagagaaataggaagaaaaagggagaatacaaatgaagcgtaaaacatggtcaacattggccaatacaattttactagtgctaccattactgctttcagcagttttgggtgttgctaatgtatcagcagattcaactgacacagttaatgtgacattacacaagcgtgtgtttgacgaaggccaagtaccggcaaacaagacaaacacaggtgatgttgatagcagttttggtggcacaccactagctggtgttactttcacagcttatgatgttacagatcattatttggcgttacgtaaagatgggcaaactgctgaagaagctactcaagctgttcaaaaagatgctgttgataaagcgccaagttatgcaaatcaagtgggtcaagatgtcactaagggtgatgatggcacagtgactttctcaaatttagcttctaaagatggcgataaagataaagtttacttatttgttgaaacgaattcaccaacggatattacacaaaaagctgatccaattgtattggcactacctatctataagacaggatctgattcagagatcaatactaatattcatgtttatccaaaaaacgaaaaatcaactgctattacaaaagatttgaatgataagagcaagaccgctttagaagttacgctgcctgatggtacaaaggtatacaatgctacatttggccaaacatttggttatcaactacaaattgctgtaccttggaacattgctgataaatcaacatttaacgttgttgatacacctaatttgggtatcgatgatgatgcctcaactgttcaagttgcaggactaacaaaaggcactgactataaggttgaaccaagtgttgctaatgaccaaaatggtaagggcttcaaaattacctttgatacaagtactgccgctgtgaaagcagctgcaggaaagaaattaactattacttatgatgcaacgctaactaacactgcagtaccagacaaggctttaaacaacacggcgacacttaatattggtaatggcactgacgttacctcaacgccaactcaaggaccaaaaatttatactggtggcattaattttgttaagcaagataagcaaagtggtaaaacacttgctaatgcagaattccaattggttaagttgaatgcaaatggtgataaggttgcttatgcaacacaagcttctgatggatcatacaattgggccgcaacagctgatggtgctacaacatatacttcagattcgaacggtgcgatatcactaaaaggattggaatattcaactaagttgtcagatggtcaaagctacgccttggttgaaacaaaagcaccagaaggctatgcacttttgacagcacctgttaagttcacagtgacacagggaagctttggtgcaagtcagttgattacaatcacgaacatcaaaaaaggcattttgccatcaacaggtggttcaggtatttatttgttcttaataattggcgcattgatgatgggtgctgcttatctttggaacaagcgtaataagaaagaacaaaacatttaattcatctctagaaagtgcaaatcatgataatggtgcgcgctttttttatcaaagtggcaaattacaagtttaatccgaacaagcccggaatctttcaatggcagtctgttgatgatgtatttttaatggtcgttgattaattagttcaagtgctgctaggatctcatcagtcgttacttggctaaaattggtctttttcgggaagaaccagcgtaaccgcctattaaaatattcattggaacctcgctcccatggtgaatatggatggcaaaaataaactttgatctgataatcctgttctaaggcctgataattggcaaactctttaccatgatcaacagtaatggattttacttggggaccgaaggcccccataaacttgccaaaggcggtgtttagagccttagccgttctattaggggctttgatggcccatagaagtcgggtcttacgttctacgaatgtaaccagacatgatcgtgactcacttcgactagaaagcaccgtatctacttcccaatgaccaaaagctaaccgttgattaacagttgttggccgttgttcgatggaagtcccacttgtaaatttcccacgattttcgctcactcggtgctggcggacattccgattgggtagatcagtcaatttgaaggggagccagccacgattaagccaattataaattgacgcagtgctcaagttataagcggccgcaatggtttctggtgatcaggttaatcgtaagtgattggtaattaaagtcgctaatgctgccgtcagcatcgaacgacgaccgcaattccgccttttgcgatctgcatcttgctgagctaattctggatcataaggtttaactcggtccaactcatagctaatcgtagctttggcgacgcctaaggcgtcagccattacttggtaagatttattcccctcattgaccagttgtgctagtgcgccacgttgaaaacgtgataaagtagatgtacccaaagtaatcactccctatatttgttggaattagctactaccattgtaagtgattgctttgggctttttaatttctgttcggattaattatagaatttgccaagtagtatcagatcaaatgtgacattctactcagaaatacctcggtggcgcttagtttggcaaattataaagggaaatgagaacatgtcaaagataaatcataatagaacgaatatttcattgaagttgtttattgccattatgtttgtgattggctttatgatatttatgtaccctttttttgccaatgctgttaataattatgttgctcaaagggaggttaattcacttaaccagattaatcaaaaagcaagtgataagaagttaaaagaactaatcgcagcgaataagaaaaaaactgaagaaaatcagcaattaggaatttctccagttaaaaatattcttggtacatctttaaaaaatgtgccaaaggaagatcagtcttattataggcaacatgccttaggtagtatatttattcctaaaatatcactaagtttaccaatttttgatacaaccactgaaagtttattgcaacaaggtatcacattgttgcccggcagttcatatcctgttggcggtaataacactcatactgtgctgttaggtcacagtggtttgactagtcaattgttgttcaccaatttacataagctaaagataggtgataagttttttttcaaagtgtatggcaagcgattagcttatcaagtagttagtaagaaagttgtgttaccgtcgaatttaaatgatgttggtataaaagcaaacgaagatttggcaactttggtgacgtgtacgccgtacatgattaacactcatcggctgttgatcactggaaaaagggttcccctcagcaaatcagcatttgaccatcaagaaaagcaaacttcgcaataccaagccaaacatctgttagtcttattggcactacttgtgactgtccttgcgatgatttgttatattttgaaacgagaaataattgaactattagctgccaaacgctattatttattacgattctatgtttatcaaaatcatcttgcagtaccaaatctaccttttagattggctcaaaaaaatggaaaaccacttttcaatcagcagggcgatatgtatcgagcaactagtgataaaaacggccaagttaactttggcaaattgtccggtggacagtacaaaattttaattgaaaattctatgacaaatgaaaaaccattctgcgcttatgtaaaaaagttgactaataaacgattttatttaaaaaagacaaagcgaagtaattatcaaatcataatggaaagtaatcaaaaaaatgactaaaaagaaaagaacaaagcaaagttttattttaaatcttatttttttaatcggatttttggttgcgttgtatccattttatgttggtgcgcttaatcattttattgacgaacaacgtattaagaccctacaatctcaaacaaataaaaatattttgtctaaagaagccagtatgcgtaagaaaaatgcaaaattgcgtcaagacggcatcgtggcaggtagtgatcctttttctgggtccacttataatgaacacgtcgacctaaaaaagcacttaatcggaaaaattagtatttcaaaaattggattagatatacctctttttgatactacaaacgaagaaacactcaattatggcgcaacagtattgcaaggcacttcttttccaattggcggggaaggaacgcatagtgttatttccgctcatcgtggattggcatcgcgggttttattcacaaacctcaataaagttaaaaaaaatgatatttttgttttaacagtattgcataaaaaattagcctataaggtttttaaaattcaaattgttaaacctgagaattatcaaggattaaaaattgaaccaaacaaagatttagttacgcttttgacatgtacaccatatatgattaactctcatcgactgttggtgaccggatatcgggtgccatacacagcagatatgacaaagaaaattgataccgccaataagtggcgtactctgaaacaaggcacaattctgattggtgttgttttgttgctaattggtcagttctttttactttatcgaaaaattgtgatgatgaaattatcaaaaaagaaattcaatttttctttttaccgacttaacaaaaatggagagcctattgctgatgtaggttaccaattattctccaaaaatggaaaagtgactctgaagagagatggtgcgccgttaattcgttattctaatttggatgggcaagtcgtatttgataatttaccgggtaatatgtatgttatgaaggagctgggcatacctaatcaaaataaagttaagataggtgttaaaaaaataggtgataggcacatgtcattttatcccaaaaaacaagatcaatcctattttaattctaagaatggcaaaaattgggttaaattgtgaagctgtattttactagattcgcttgacttcgaagatcaattagtataaatttaaatcaacaataaaatcacgtgttatatcaagagctagtgagtggttacacactttgacctagcagcaacctactataattggcaaggtgctccactgtaaacggatatacgtcacttaaccgtgttcgtatatcgagcgcggtttttctgtgacaaagtccaagtgacgttaaacaggagaaataaatgtcaagtatactagatgagcaactacgattcatggctctggaacaaaatggtctcatgaaatcaattctaactttgggaatatctgaacgagatttaacgttaatcagacgatgaacaaatcaaaaagatagctaatttaaaaattaaacaacttaatggtgaggcgatcaatgaaaatataaatatctttaaggtagattgtaaaattaaaccgaacacttgaataaaaaagccgcagcgcctttgatggtaattgtctaaaacaaccataaaggaactgcgactcatgactagtttatcatctcaagaacgcactgtcattcaaactttactcgaattgaattattctgttcgtgccattgcgcgctttattaaacgctctccttcaaccgtttcgattgaaattcatcaagttacaccctataaagctgagattgctcatgcgttggcattgaaaaaacgtcatttacgtggtcgtcatgacacgctaacaccagctatcgctgtctttttgaatcaccacattggtatattgaagtggtcaccagaaaccgctgcgcatgttttagggttacctttcaaaacgatttataattggctcaatgctggtcgactcaaactatcattggctgatttacctgacaaaggtatccgtcaaaagcgtcaatctgatggtagacgacaagtatttgtgcatggtcgttcgattgaaacgagacctgaaagtgtgaaagcacgacaaacctttggacattttgaagttgacaccatgcaatcgggtaaaagacgtggcgatgtgctggtgacaattactgaaagactaagccggcaacatatcgtgagacaggtcactgggcgtaatagtcaggcagtgacaccagtcttaattcatttttttcaagggatcaaaaatgccaagtcaatcactgttggtcgtgggcgagaatttgcaaaatataacgaaatcgagcaaaaactaggcattccagtctattttgcgcacccatattcaccagaagaacgtgggagtaatgagatattaaatcgatacgtccgtcgttttataccgaaagaacgcaaaattgaaacagttagcgccaaagaattagatcaaattaatcattggatcaatgcgagaccaatgaaaacactcaactggcaatcaccacgaaaggtttttcagcagtttgcagtgttcggttaattcttgcaatctaccttaaatatattgccaattcaaataatcctttttcaatcggcaaattctataattaatccgaacagaaattaaaaagcccaaagcaatcacttacaatggtagtagctaattccaaccaatatagggagtgattactttgggtacatctactttatcacgttttcaacgtggcgcactagcacaactggtcaatgaggggaataaatcttaccaagtaatggctgacgccttaggcgtcgccaaagctacgattagctatgagttggaccgagttaaaccttatgatccagaattagctcagcaagatgcagatcgcaaaaggcggaattgcggtcgtcgttcgatgctgacggcagcattagcgactttaattaccaatcacttacgattaacctggtcaccagaaaccattgcggccgcttataacttgagcactgcgtcaatttataattggcttaatcgtggctggctccccttcaaattgactgatctacccaatcggaatgtccgccagcaccgagtgagcgaaaatcgtgggaaatttacaagtgggacttccatcgaacaacggccaacaactgttaatcaacggttagcttttggtcattgggaagtagatacggtgctttctagtcgaagtgagtcacgatcatgtctggttacattcgtagaacgtaagacccgacttctatgggccatcaaagcccctaatagaacggctaaggctctaaacaccgcctttggcaagtttatgggggccttcggtccccaagtaaaatccattactgttgatcatggtaaagagtttgccaattatcaggccttagaacaggattatcagatcaaagtttatttttgccatccatattcaccatgggagcgaggttccaatgaatattttaatagacggttacgctggttcttcccgaaaaagaccaattttagccaagtaacgactgatgagatcctagcagcacttgaactaattaatcaacgaccattaaaaatacatcatcaacagactgccattgaaagattccgggcttgttcggattaaacttgtaatttgcctcaaaaataaatataatttaaaatagtgcctcaaaaactgtacagtttttgagacttatttaaaagtgtgctatactggggtttgtagagtctcatattcttagtctcagaaaagagtggtttttttggttaaaatttatggttatgcccgggtttcaacttcaagtcaaaatttagaagaacaaattgctcaacttgtcgacgctggtgttgatccaaaaaatatctattctgaaaaatttactggcacaaccactcaccgacctatttttgatctactattaaacacaatttctagtggtgatactttagtcattacaaaacttgatcggttcgctcgaaatacgcgtgaagccttaaatagtattgaaccactgttagatcaaaatattagtattaaagttctcaatctagggactatcgaaaatacaccaatgggcaaaatgattgttcgaaccttgttgtccgttgctgagatggaacgtgatatgattgtcgaacgaacccaggcaggtaaagaatattccaagaaacacaattctaagtttaaagaaggtcgccctaaacgaaagattggcccccatgaaatggcaatttatgaatattatcaaaaccattccatcaaagaaaccactgaagcttttaatacttctaaagcgacactcttccgaatcaaacaacaaattgaaataggcgtataattagacgctgaacaatacaagattaatgtatattttctagtgctcctatgtcaataaatggcacatctttttctaaacactcgttctaattctgtcggaattaaaccaactgatgtaatttgaggttcggattaccaagtcctcaaaattggaaaaagttgtttgaaaggcaaactctctcttcaacaatgagtgaaaagcttcaattggcccattatcataaggataatcttgttttgagtatgagtggctaatctgatgccgttcaagtaaagtttcaacttcgttgctggtgtactgtgaacccatgtcagagtgaaaatattgtggcttttgatgatattcaagcgcctgattaatcgtttctacaactaacgtcgcctccatctgacgaccaatcttgaaagcaagaacttgatgaacctttggttcgtaaatagaactgagataaacccaggttcctggacgtaattccaaataagtaatgtcagcacgccatatccttgcattgggctggtgcttgattaaattggggcgttgtgaatgatccacatgagtgccaggttttttaaatcgccgattcattaaagagtgaatctccatttccctcattaatcgtaaaattcgttttgacccaacacagatgcctgacttgcgaagcaccatcgttattcgtggataaccataggcacgataattattttcccaaatcaatttaattttttctttgagttgattatcaacacgttcgtgttgactaggttgatatcttttccaatggtaataggtgctgcgcggtaatttcagtgccgaaagaataattgataagcggtgtcgcaataactgatcttctatgaagacaaggcaattaattcgtcctaatgctttcccagtaacaccgccgcagcttttaaaatttcgagttcctcctttaatcgctgattttccttttgaagttgtttgaattctttggacgttacttcagtaccgtcttctagctcaactgatttagcgcctttaacccagttatgaattgcggctggagaaacaccgtattcctcggaaagcgagcgaatagatcttttctcttcacgatgcatcttcacaatgctggctttaaaatcatcttgatatcgtttcattggaatgctcctatcttgttttattaattatggcacaactgttcagaaatttatgtaccaaatactaggataggagcaatacaatttacttcataaataataattcgcatgagtatattaatgatactaatgaagatattttgatgaacatagttgtaaaatatgagaacctataatgtaatatgcaattatatactataatatataattgcatattttggagggttcatatgagagagagagtacaagagaagagtgtagaggtaactgtattacttctaggaattatatttgtcgcaacaaatttaagagcaccattaactgcagttggccctttaacaggtttaattaaggacaatattggtatttctggaactattgcgggatttttaacgacaattccgttattggcttttgctattttatcaccagtggcacccaaaatagctgaaaaattgagtctagaatatactattggttattctacaatcgtattagttatagggttatttattagatcaattccccaaacaagcactttattatttggaactattttagtaggtagtgcaattgccatgtgtaacgtattaattccaagtttaataaaaagagaatttaatcatcgcttaggcctaattactggtatttattcaattagtatgaatttatgtggggcaattgcatctggagttagttttccattagctaataatctaaatctaggttggaataattcacttaggatttggcttattttggctttaattgcttgtatcgcatggattccacaattgaaaagacatgataaaccagataagatagaggaattacctatagagaatagtatttggcattcaaaaactgcgtggcaagttactatatttatgggcctacagtcactagtatttacgtgttagtcgcgtggttacctgaaatgcttattcaaaagggattcactgcagaacaagctggttatttattgtcaatgatgcaattatttttattaccatttacatttataattccaattattgctgggagggtcaaaagacagagtaaaattgccataaacacatcaatcctaatgtgtttatgaattagtgggctttttataaataatactattattataggaattgcttttattggaatcagtggtggctgtgcatttggactatcaatgatgttttttaacctaaaaaaaagaaatgcaagagaaggggcagaactatcaggcatggctcaatcaattggttacttgttagctgcaattggcccaactctctttggctttatgcatgatatgactcataattggaatgtatcattaattattttaattgtgactgctattttattagggggatttggattctttgctggtgaagataaatatataaattaaaattatgacagatgtttttaccaaataaatagaaacgttagtatgggtaacaaataccccaaaagttaaagtaaatagttagttgtcttttctaggtggcacattgtcgatattttatcggcgatgtgccgcctagtttcatttttttaggaaaaaataaaccacaccttttaggtgcgggagttagaattagcttcagcattaaaaatccctttcgctatagagaatggctaccaaccaaatctaaaagcgaaagggatttttatcatgtctcaagtaaaagacgatagtagtttagcagcacataccagatggcagtgtaagtatcacatagtgtttatcacagacatatttttaggaattgattcttttgtttagtgtaagttattctgaacgaattaaaatcgaaattttttgtgagctagaactgtccaatacttaaatagaataggttaaagtacattagtgctcaaaatatgacgactatgttactcagaattaaccgaactttgattgaagcgcttaaccgaggcgatattaccagattatgttgactaatttattaaaaaatttagatcaaatttgcaatctatctattttaaataatccgtcatgactgctttaaagaagtcgatgtgtttgaggtacatttcttcgtcaacgtattcgtcgatcatatgactggtatcattgccggggccgacaactgccactggtaagttggggttattcttagcaaagtgggcggcatcagtaccaccagcaacgtgcatcagtggataagcttgggataacttttgtgcgccgattttttgaacactttgaatgaatggtgcctgtggattacttttaaccggtggttggttattaatgacagttaatgctaaattcatgtctgtttgttggttaagttcagcaataatggcattgagatcggcaatgacttggtcgccagttaatgcgggggtcgtgcgaacgcggcaagtgagttctgcgtgaccggggaccgaattaatttgttcaccaccattgattaaggttgtgacgggaacaatatcgccgaggacatcatcgatgggatgcttttgatcgaagtattgtttttgtcgattgtagtaggtgagcaaatggtcaattgcgttaataccgagttcgggcattgaactgtgggctgttttaccagtcgccgtcactttaaaatcaagggaaccgttgtgggcgaaaatcagaaaatgttgttcattggtttgattagctctgagtagtttttggacgatttctgtgggaaatttgtcgctactgtttgccaaggcttgtttatcaacgccagatggttcggcaactaataaggctgtcaaattatcggcataaccttgggttgttaaagtttgggcaccagtttcgttcttttcttcatcgactgttgcaaggagtttgatttgaccatttaatgggacattttcatcgtgtaattcgatcattgcaatcacaagagcggccagtccagatttcatgtcagttgcaccccgaccgaagagtttaccatcgcgagcggttagggtgaagggatcactcgtccatttgctgcgatcgccgatgctgacgacgtccatatgaccagtcacgccgaggactttgtcggttgcttcacctagataggccactaagttttcgcggcctggtttagaagccactttttcagtctggataccgtgttgtgtgaatagatcggctaagtagtcggcaatcacaccttctgcttggtctgttgtatcaattgagaccagtttttctaaaattgcgattttttcagttttttccatcatcaaaagacctccagataagattcaatatgcattatagagcccgtatttagggaaagcaacggacataaattaagaaattctgcaaataaagtgcatattgaaaaagccgtcacagttaatgtgacggctttttgtttgtctgatctgtgaaggcttctttaaaaaactgaccagcactcgagaagacttggccttttttccagataatgttcgtattgacggttagtggtggattaaacggaacgaattttaagccgttgtccttagtattgataatgccgtcgatgcacaatgcggcgctgttactggttttgaccaataatgaggcgttatataaaagcgtataggttccgacaatatcaagttgatcaaggttagcaccaaaccaattactaatttgttgacggacgagggattgtcccgaaattaataagggatattgcgccaaggttgctgcatcaacggtcgagtgcgccgcgattgggtggtcgtcggcaaccagtacgccccaatggtctgatacgggtaagcggacgaattcatagcgctgcttatcaaccggatcaatgacgagcccaaaatcgagcaagccttgatcaatccgttctttaacctcatcggcagtgccgctgaataattgcagagtgatatcagggtagcgttgacgtaaatcattgataatcatcgcgattaattgaaaggcctgcgtttcaccggcgccaatgctgatggtcccactgacgacctgattatgcgttaagttatttgtcgttgtatcaactaaagataagatttcgcgtccgcgtttttgcaggtaaatgccatcggttgttaatgtgatttcgcgattgccacgggtgaagagttgaacgcctaattcaacctccaagtccttaagttgtttagagagcgtgggctgtgataagtggaggacctcagcagccttactgattgttttctcctgggcaacggttaaaaagtaatttaaaacacgtaaatccataatacttctcctattgataaaagttatagctagctattcgatatgagtattagtcattgttagtttagcgaagtatactgaaaacagcaagtaaagaagcgcgctaaaaggaggtaatcaaggtggactactcattgcgaacgagaattgcgaatcaaccgatttaccatgattcggagttgcttaaagaaattcatttggtcaaaggcaataatgagcgattagtgatggaaatgaatacaggctatcacgatgcagccgaagtacgggcgtatttaaagtgtattacggatcaagaaatagatgaatcagtgacagtgtcattacccttttatacggactacggtaaacatattacctttggtaaagagatttttattaataataatgttctattcgttgatttaggtgggattacgattgatgatcacgtgttgattgggccgcgcgcctcattaattaccgtgaatcatttggaaaatccagccgatcggcgtgggttattcgttaaaccagttcatatcaaacagaacgcatggattggcgcgggggcaacaattctccccggtgtgacagtcggcgaaaatgcgattgtggctgccaacgcaacggtcaccaaagatgtaccagctaatatgattgtcgccggcacaccggcaaaagtcattcgtcaaattaaagcagaaaaggagttttaacatgtcaattcaaaataaagtcgttatcattacaggtgcctcatcaggtatcggagcagcaactgccaaattattagcaagcaaaggggccaaggttgttttggccgctcgtcgcaaggatcggctccaagccttagtggcagaaatcggggaaaatgcaatttaccaagccactgatgtcactaatcgagaccagatggcaagcttagtccaattagcactcgatcggttcggtcgcgtagatgtcttatataacaatgctggcgtcatgccccaaggaaatctgagcgaacgcaattacgatcaatggcaaaagatgctcgatatcaatatcatgggtgttttaaacggggtcggtgcggttttaccaacgatgcaagcccaacaagatgggttgattatctcaactgattcggttgccggacatgtcgtttatccagcttctgccgtttataacgggacaaaatatgctgtacgcgccattatggaagggttacgccaagaagaaaaagataacggcatccgctcaacgattgtctcaccaggtgctgttaaaacagaattggtcaatacaattggcaacacggctgttttcgaaggcgttaagcaattaatggatgccccagaagaatcagcgttggccctcaatccagaagacattgccaatgcagtcttatatgcgattgaccaaccaaaacatgtggtggtcagtgaagtcttgattcgtccagctaaacaacaagtttaaaagagtgttcgactaagtgggtaatgcgtgaggattagcctaagcaggcgaataactgatttagtcagttatttgactgatgtagctaaacgcaaggcattgcttaggcgagcacgtttcaaagtggtatttagctactgagaattaataaaaaatcaccttaatctgttttttaagattaaggtgattttttagattaagtacaaccaggttggtaatcaaaatgtgaaatggatgacaacagctttttgaaatgaaaagtcgtataataacagtattctaaatgaaattggagatcataatatggcagaattgatgcgtttttatcaaagctttcaaccggaacattatcaagtttttctagatattaatcgggctcaaaaacgatttagtggtcggacaacaattaccgggaccgctaaggatgcggtggtcttaattcatcaaaatggtttggtgattgaaacggtaagtgctgcggggaagagcgtgccatttacagttgataatgacgcgaatgccttgaaggtcgaagtgggccaaccaggcgaagtgacattggtcatttcatacacggccgctttaacggattcgatgatggggatttatccttcttattatcaagtcgatggggtgcaaaaagaattgattgggacgcaatttgaaaccaactttgcgcgccaagcttttccatgtgtcgatgaaccagaagccaaagccacttttgatttagcaattaaatttgacgaacacgaaggcgaaacgattctcagcaacatgcctgaaaaagaagtcatcgatggcattcatcattttgaaacgacagttcggatgtcaacgtaccttgtagcgtttgcttttggtgaactccaaggtgcacaaacgaagacgaagagtggcgttcaagtaggcgtttttgccactaaggctcatcaagccaacgaactcgactttgcattggatattgccaaacgctcaatcgaattcttcgaagatttctaccaaacaccatatccacttccacattcatggcagttggccttgcccgacttttcagccggtgcaatggaaaactggggcttagtcacttatcgagaagcttacttattgctcgatccagataatacggcgctaacaacgaaacatcgtgtagcaaccgtgattgcccacgaattggcgcaccaatggttcggcgatttagtgacaatgcaatggtgggacgatctctggttaaacgaaagttttgctaatatgatggaatacgtcgccatcgatgcacttgaacctgattggcacatttgggaaagtttccaaacctcagaagcatcatccgctctacaacgagatgcaactgacggcgtgcaatcagtccacgtgcaagttaacaatcctgctgaaatcgacgccttatttgacggcgcgattgtttatgctaaaggtgcacggatgctcgtgatggtccgtgctttaattggcgatgatgccttacgcgcaggtttgaaggcttactttgcagcccatcaattcgggaatgcaacaggggctgacttatgggccgcacttggcaaagccgctaacttagacgtcggcgctattatgaattcatggctcgaacaaccaggttatccagtggtaacggctaaagtcgttgacggacaattaacgcttagccaacaacaattcttcatcggcgaaggccaagaggttggtcggcaatggcaaattccattgaagagcaactatgcggctgcaccattgttgatgactgaccgcaaattagtgcttggcgattacgcgcaattacgtgccgctaatggacaaccattccgtttaaatatgggtaacgaatcacatttcattgttaactacgatcaaacgctattcgacgatattttaaaagatagtgctgaaatggcaccaatttcacaacttcagttgctacaagatttacggttattggctgaaggacgtcaaattaattacgcagatgtcgttccagttctagcaccgtttgctaagagtaattctaacttagtggctgatgcactttatacagttgctggtaatttgaagaagtttgtcacagccggtgaaacaagcgaacaacacttgcggactttctttgatcaattgagtaaagcacaagtcgcacgcttaggttggacggttcaaccaacggataccaatgatgatcaattgatgcggccaacagttttaagtgcagccttgtatgctaagaaccaagcagcgattgatgctgcgcacacattattccaagttaaccaagatcagttggcaactttaccagctgctattcgggtactagtcttgatgaatgaattgcaaaactttggtaatgctgtgctttacagtcaactcttagaagcttatcgtcaaactagcgatgccagctataagaacgacttgagtgccgccttaacacggacgactgatcctgaattaatcaccactttaattagtaaatttgaagatgctggtacaattaaaccgcaagatttacgggcttggttccgaggcttactcgctaacgatgcgagtcaacaagccacttgggattggattcgcaatgattggcaatggctagaagatacagtcggtggcgatatggaatttacaacttatatcacatcaatcgctgcagtcttcaagacaccagaacgcctagcggaattcaaagccttcttcgaacctaaattagacaccccaggcttaacccgggaaataacgatggacattaaggtgattgaaagtcgcgtggccttgattgaaagtgaaaaagaaaaggttaatgcggcaattgcacaacaaatttagtagcatagcgtgatgaaaagccgccctaacaaatatcggtttgttggggtggcttttttgcgggataaattttttcaaaatagctcttgtcttgaagtgcactttaaggtctatacttcattttgttgattagagattaaacgaaatggaagttattaaaatgaaaaagacaaacaagaaggttattttagcgattatcctcatcagttattttatgattttattggataattcaattatttttacagggacggttaaaattgccgccgaattaaacttaagtcaaacgacattatcgtgggtcacaaatgcttactcactaacgtttggtggtttgttattacttggcggcagtattggtgatattattggccgtaagcgggttttcatgattggactgacagttttcgcggtagggtcattattagttggccttgccaatagtgcggtgatgattattttagcccgggcatttcaaggcattggttcagcaatcttggcaccaacgactttggcactcttaatggacagtttttcaggtgaagcaagaacacgcgcgattgcggcttatggtgccacagctggtattggtgctagtattgggttagttataggtggtatttttgccagtctactatcttggcgggacggctttttcatcaacgtaccgattgcgattattatgattggtttaacggtcctttttataccaaccacacaagccacacaagctaagcgattagatttaatcggtgcactgacgtcgattattgggatgacggcacttgtttatagcctagttggccaacaaggccgcttactagcattgttagtagcagtcgttgcgattgccgcttttatctggcaagaagcacgaacgaaacaaccaatgatgccattgcgcttgtttgctgatcgcgaacgactagggggctatattgcgcgcttcttctatctgggtgcaatgttgagtatgtggtttttgacacctcaaattatgcaaacccatttaggttttacgccccttcaagcaggaattggctttttccccttaacggtggttaatttcatcgttgccttgcaggtttcaaaattaacaacgcgctttggtaatacgaaattactaatcgtggggattgcaacgaccgcaattgggatgggtgccttaggctttttctcggaacaagttggctatgcgctaggtattgcggttcccatgatcctgatggggattggacaaggtttaacactcagtccattaacggtcgccggtgttgccaatacgttacctgcagatgccggtgcagcttcgggcgtggtcaacatggtcctgggggttcaatcgggatgtcgtttatcgtggctgcttcagcgacttttaaaaacggtctaacaagttaccacgttgcaatggggttagcgaccgttctcttgattggtgcgttgcttgcagtgatcggcttaattttaccaacacttaaaaaggagtcttaatgatgaaaaaaatcttaattattggtgcaacaggttcaattggttcagaagttaccacacatttattagctgaaacggatgcgcaacttactttattagcgcgccacgttaaccaacctaatcaagaacgcgtcacgtgggttcaaggagatgcgaccaatctcgcacaactcgaaaaagtaatgcgtaatcaagatgctgtttttgtggcggtcagtggacaattagctcaagtagccaaggcagtcgtgacaacgatgactaaattacagattcataaactggttttcattgcttccatggggatttataatgaaattccagctagtattggtgcttcgggcaatctggcatctaacgggatgttacaagcttaccgtcaagccgcggatattgtcacggagagtactttgaattatactgtgattcgacctggttggtttgatcaaggcagccatgattatgaagtaactggtcgcaatgacccttttggcggccatgatgtctctcgttgggcaatcgctgatttagtccggcgggtgcttgaggacgagcaattatatgcacgaacaagtgtcggcattaaccggccataataaaggagttacgtgagatgaatattaaagaagcgagtcaacaaacaggtgtcaccgcgacaaccattcgctattacgaaaaagagggcttaatcccggcaattgatcgcaatgatgttggtgtacgggcgattgacgaccgaattattagaagaattaatttcgtaaagacaatgcgtgcagctgggatgagtatcgaagcgcttaaggaatatattcgcttatttgatgcgcaagaagataatacaacgcaacaatttaaattattgaacgaacaaatcgcaattatggaagaaaagcgcgatgatcttcaaacggcaattgaccatctgcgctggaaggttgatcactatgaagatcatatggcagttacggaagaagaattaagagcggttgaaaaaaatagagctgattaataatcactgaagttggggcagtttatactgtgccaactttttttaaaattaattgttaggtttttattggcacaacctaactaacgcgttaaactgattttcgttaggttaaccgatataaaaactaactaattatgaaagcagtgatcaatatgacaaatgaaacacaagaaattatggcgttgttcgccaaactcgttcaatcacggtattttgtggcatcggcatggatgacggtcggcaaagaaagacggcgtgattttatgaatacaaaggggaaatcacgattattaaatctattggccgctaaagatggcctaacgaatgctgaaattacagaattactagatatccgtcccagttcagtgagtttgcaagtcaaggcacttgaagaagatggctatgttacacgccaagcatcagcagccgataagcgggtttccctcatttttattaccgataaagggcgggactcaattgaaaaaggtgatttagaaactgacaagttatcagaaacgattttagctggactaagtgaatctgaaatcaatgaattacgggtgctcttaactaaaattgccaataatgtgcaacaaacacagtttgattcagcctttttcgaacacgggcaccatatgcatcatcaaaatcacggcgattggaatcgttcacgattcccttggtaggaggttattattatgcaacaaatgagagtcgcaccatctaaaagtcaatttagtttcaaagattttctaggtttaattaagaatacaaaacctaaatattggcagttgttcttgggtttagcattagggctagttgcaactggtgttcagttagcggttcctagttacgctaaacaattgatcaatagtttttcaaaacaatttaatatttacatgttgattgggattgttgttttattcatcttaagtgcggtgatcagtgccgcttcgggatcactactcggctttttcggggaagatgttatccagaaattacggaataacatttggcataaattattgcatcttagagtgagttattttgatgacgtgaagtcgggcgaaatgacatcacggttggtgaatgattcaacccagattaaagatttattatcacgatcatttcccgggttagtaacagccattttcacaattgtgggggcgttcgctattatgctcttcatggattggaaaatgactttaattatggccttttcagtgccattggtcatggccgtgatgttaccgattgcgaagaagtcacacgctattggccacacgcgtcaagatgagttagctcgtttcaatggcgaaacggatgaaacactgagcgaaattcgcttagtcaaatcatcaaatgcggaacaacaagctagccaacaagggcaaactgctattggcagcctttataagattggtttacgagaagccatttatgattctgtcgcgggtccgattatgaccgctgtcatgatgggcttaattgttggtattttggcctatgggtcagcgcgagttgcccaaggcaccatgacgattggtgcgatgttctcatttttaatgtacttattccaattaatggggccagccgcaacactagggcaattctttacaacgctctcaaaagctagtggctcgacagaacggattcaagaattgatgcaagaagccgaagaagactttgatcaaggaatggcggtcgatgtcgaagaccaaacgttgaaagttgaatcagttgattttggttacgacgatgatcaaacgattttacatgatttatcatttgaagcgaaacctaatacggtagtcgcttttgcaggcccttccggtggcggaaaatcgacaatcttcagcttattagaacggtattacgaaccaaatcagggtgcaatcaagattggcgaaacgtcaattaacgatgtttccttagcagattggcggaaacaaatcggttttgttagtcaagattcagcgattatggcgggaacgattcgagataacttaacttatgggttaaccggtgaatacgcggatgcacaattatgggctgtattacaattagcctttgctgaaaagtttgtgcgtgagatgcctgaaggccttgatacagaagtcggtactcggggtgttaaagtttcgggtggtcagcggcaaagattggcaattgcgcgcgcctttttacgcgatcctaagattttgatgctagatgaagcaacggccagcttagattctgaatcagaagcaatggttcaaaaagctttagaaaccttgatggaaggtcgaacgaccctcgtcattgcgcaccgtttaagtacaattgtcgatgcagatcagatttacttcatcgaaaacggacacgtttcaggtgcgggtaaacatcaagaattagttgctaaccatgaactctatcgagaatatgtggagacacaatttaatcaagactagagtgtgtcattaacggtcagcttccgagcattagcacaatgacgtgaatgaacgatagtgtcgttcgtttgcggcatagcgctaagcggaagaagctgttaatgaaagcacgtttaaaaaagcgtgcgtcattaactgattattttagctcttccaaaaacagagtagcgtccgaatcaattggacactactctgtttttggttttgggttataatagtagaaaagagcaacaatttagtgcataatatatcaatatttattagctattgaagattataatatgaatgaattttacctagtggcgctactgttagtcggcgtcatcgtggtcaacgtggttaagcaacttgtaccacggataccagaagcctttttattaattgcgatgggttggggcctatcgtttatgccagtgttccacaattttcagttggaacccgaatttttcatgttactgatcattgcgccgttgatgtttatcgatgggcaaaagcagtcgtttgctaacattcggaagagatttcagggcattttcttactctcagttgtcttagctgttgttacggcagtggtagttggcgttatgaccaagcaaatcgaggctcaatggaccttcccattggcgcttgcgctagccgcaattgtcacaccaacggatgcagtcgcggttaaatcaatgaccggtaacaatgatatgcccaaaggtgtcggcgaggcactcgaacttgaatcgctatttaatgatgcgaccgggttggtgatgttggatcttgctttgtcagtgctttcaaaagggacgttctcggttgttgaaggcattggacacttcctatttgtagctgttggcggggtggtcgtcggtattattggcggggtcttattggtaatgcttcgctttaacttgaatcgacatggtaaaaatccagaattaacgacgattccgattagtttattgacgccatttgcgatttacttattagcagaacattttggtgtttccggaatcttagcggtggtcgcaaccgggattgaacataactgggaagctgatcgtctgcgattgacatcaactagcgttcaactgacttcacgaacaatttggaatattctagcggatatactcaacgactttgttttcttgattttagggatttcgttgccagaagttactcgaaatgtgacacaaatggggcggcaaggggctgctgcgttgttaggagtcagtgttttaatttacgttgtcatgtgggttgtgcgctatgcttgggcattacgcggggatagttcttcaatttcagctttctttggtgatcgaaaaagtgatgagcggccattttttgcccgcttattcgcagtcagtggcattcacggcacagtgacgttagcgatggcattctcattgccaaacaagattgcagggcatgcctttccatatcgaaatgagttaattgcgatcgcgactttcgtcattttaatcagtatggtggtcagcgcgattgtactaccgtggaagttgccacaaaaaacggaagcttatacgatggccgatttggatcatatccgcaataagatggtcgattatgttattttacaaatgcgttctcaaattgaagaccatgccgttcgcgaagcgctaacggaccagcttcaatcacaaaagagcaatcgattaacagtggatcgcgcgcagtcgatcgctaactataacgcgttattgagtgaaactaaggaagtggtggataacttcctccattgcgatgatgtcaataatcgctatagtccagaaattgttaatatttacgacaaaatattacgacgcgtgctagtggaatccaaacgtaatcactttaccttgcgaatgaaacattcaattaagcattggaaaaaagaagttttgtggcatacaagtcaccgcgtgattacgcgtgaccaacaacgccgtttccgagatgcacggattgccgaaaatcctgaattgtcagaacagattaaacaacgcgaagtaatgcgtgatgatttattagcacttaataatgaagtgacagatacgattgacaattatctcgatacggttctagaaaatcgcttgaagcaaaagcatagcgataatgatttcgtttatctagttcgtcgtacaatgaatcatttctgtgcgcacatcaaacatgattatcaaaagagtgcggcaacggtgccagatatcctatacgttcaagcattccaacatgaatatgattttgtgcaacaaggcatcaacgccggttatatcaatcaatcaattgccggtgtgttgtataccgaaattaatcaagcgcagttattacaactgcaacaattccaagaaacagaagaaatggcgttgattgaggcttaattaatagcaacccaaaagagctgttcagattttaatctgaacagctctttttttataattattcaaacattttcttagtagcgcgcatcaatgtcttgatatcacgatcgtaacgtggtgtgtcgactaatttcgccattggaatcccagcaaagtggtaagccgcaatttcaccagaacgaacggcactttgttcagtgaaaatcatctgataaggttgttcaacaaattcaccagtgaaggctaagttagttgaatgttcagggatgacctctggacgatctgtcttggcacgattgttgaagagtgctgaagcatatggcatatagacagggatgttgttgataacactgtccataatttcagcttccttttcgcgaatattgattggaccagggtcgaccttagctaattgaccaatcaattcttgtagcatttccttaccagtcatttcgatgtaaggtttgtccacgaattcaccgctccgacgtggatagaggaagtaaccccagataaccgcttcgtttggtttttgagttgtgaagtgaggttgatggtgaacaacaatcgacatattgacatctttttgaccaagtggtgtgattggttttgttgataggaatgagtttaacgcattccctggaatttgagtggtaatgcgttcgatttcgtttaataaagtatggtttttagtggttaaagtaaagctgacccattcactggcattacggtcagcgaagaatttatcggggttaccgaggttgtagaatttagaagcaatttgtttccacaagccagcagcagcaccgtaatccatattttcaggggctggtgtgttgtaatcaccaagtgtcgcagaatcagtgattgaaccatttgtgaagataacagcagtatcgtcatcaaccgtgatgtgttcaacttcatctgtttcagtattggtcatcgtcataccagtaaccgttatttcatcagtcatcttagtctctttaaagtctaaatcagtaattcgacggttgagaatgatgcgacaaccttgatcttttaagtagttaataagaggtaacatgatactttcgtattgattgtaacgtgtccggttaacaccgactaagtgttcaatctgtgtgaattcataaatcatttggtgcatataccggcgtaattcttgtgcggaactttgtgttctgaaagcaaaggttgtttcccacatgtaccagaagttagtttggaacatatgtggatcatccttgaagtattcggcaattgaaacgttgtctagtttttcttcttcagagtcgggcatcataattaatttggtcattaataaccgatccttattattgaagccgaggtgaccagcatctaaaatacctttgctaccttccaataaacgggccttgtcgaacgtgcggtgttgcgcgtcgaatgaacgggtatcttcttcagccgtcatattaggttcagttgctgaaggaatccgacctaaaagatccattaaatcgacgtaagtccggtaattaagcatccggccaccacgggcaacgtagcccttagtattttctagtggatgattcttgttccagtattcatcggttgtttcggaaacaggtgcaccatcgtttgaaccatggtcatctaatgagtagaatgtaatagcatcaccagaccaaccgccttcttgaattaaatagactgctgcggccatgtttgaaaggccagcgccaatcatgattgcttttttcttgatcatatgaaaaacctcctagattcagtttagaaattaatagcgattaacgactttcgaacttttcgtaatcaactgaatcatctctaaatagttccattttcttagcaactaagcaagcaccggtgacggtgattcctgcaagtacaagactgcctaataagaatttcttcatgatattcgctccctttcattaactaccttggatgtctatattataccgcgaatcaaaaaaaacaaaaaggtaaaacccttacagaaatgctgataaggatttaataagaacaaatgccctattaaataagggaaaaggagactaattaattttaggttaagttgctcttaattatttcctgggaaatgacagatttgccaaaatagagcgataaataagaatgctagagaatgtcgcgcgtttattgaagcggggtgtgagataatagctaggcaattagtgaggggtgaatgatactcgtaatgacaggaggaatagtatgaacattggtcaccaaatcaaacaaaatagattgaaacgggaatggacccaagaatacttagcacagctgttgaatgtatcacgttcaacagtttcgagttgggaagttggccgaaattatccagatttagaaacgattgtggcgattagtgatttatttgctatttctcttgataaattattacgggaggacagtctcatgaccaaagaagtttcaaaacggatgcacatgaacaagtattataaaatcgccttgacgatgattgcagttattttattaggattggtaattagtaaccggcgtctaagccaattggaacaacggtatcgggagaatttaacgcattacggctggcatcttgataaagataccagtccatatgctaacaatagtgcgtatgaacttaagacgggggatatgacctattacacttacatcctaccaactggttataatccaattccattggaagaacgtaaggtgaatattatcacgcgacaaaatggacacgttgttgatgttttagatagtcagcatattaccgtcgtcttttcgaagtctagtgatgctcagctaaagtatcaaggtagtgttcaagttaatctagcaggtgaattgattgctgatcaaccacggttaacgagtgctaagaaggcgtattttaaagcgtatttaaagcaacaccaaaagacttatcaagtattaatccaaaatagtcttcagaagaaacaagagatcattactaaacggtagttaatttaaatttaacgggtaaaaatgcttgacctcaagtcagcttgaggttgtaaagtagtcttatcaattagaaaaaggagacttttaaatgcaaaaattatctgccttaacggccccaatgaccttaagcaacggtgttacaattccaggattaggttatggcacataccaaacacctaacgaagaaacgaaaaaagcggtcttagaagctttatcagttggctatcggcatatcgatacagctgccgtttatggtaacgaacaaggtgtcggtgatgctttgaaagaaagtgatattgctcgtgaagacatctttgtgacaagtaagttatggaatacggaacgtggctatgacgctactaaggctgcatttgcgaaaacaattgcaaccttaggtgttgattatttagatttatatttgattcattggccagcaaataccaaacaatttggagctaaagcggccgaattaaacgctgaaacttggcgtgcgatggaagatctatataatgaaggtaaaattcgtgcaattggtgtttctaactttatgccccatcatttagatgaaatcatgaagactgctgtaattaaaccaatggttgatcaaattgaagtgcatccaggctggccacaagcagaagctgtgcgttataatcaagcgcatgacatcttagttgaagcttgggcaccacttggcgaagcaagtgccctttctaatgaaacgattgcggcaattgcgacgaagcacggtaaaacagcagcgcaagtttgtcttcgttgggggattcaacaaggtgtcttaccattacctaagtcaacccatcaagaacgtatggcgcaaaataccgatatctttgactttgaattaacagatgccgaaatgacccaaatcagtgctttggaaaacttaggcggtcaatgcatggtgccagatgacgttgatttttaatcaagcgtaaggaaggttaatatggcattatcaattggcgaagtcgcccaacaatatgatttaagtattccgacactgcggtattatgaagaacagggactattaccgtttattaaacgcagtccggctggtcggcgggaatttcggcaagcagacttggattgtctatgtgatattgaatgcttgaaaaaaacgggcatgcagttgaaggacattaagcaatatatcgattggcgaactgcaggcgatgaaacattggaccaacgtttggcgcttattcaacaacggcgacaaatgttggccagtgagattgaatcgctgcaagcagaattaacgaagctagatcataaagaatggtattacacaaaagccagtgaggccgggacagaggctatttttacggcggattgtgatacggaatacgaacgtgctcatcagaataagtaattaaaaagaggcgaccttgataggtcgcctctttttgttaacagataaccaatattaatgaaggtttaaatccttttgcataatcaaatcgcgttgcgcatcgtcaccgagttggaagatatgaccgccaatttgcttaaagcctaacttggtataaaaggcgagtgcggcagtgttgtgttcccaaacgccgagccaaatatgggctttatgggcctcttgcgccattttgatggcgtattcgatgagttgtgtgccaagaccaagtcgtttaaatgttggtaggatatagatgcgttcaacttccattgaatcaggattaggattttcggtttgggcatcgttactgtttaatttaaggtatcccgcgatattgccgttgtgtttaataaagtagaaggctgaattaggattagcgatttctgaactaagttgcgtatcactgtaggcagattctagatagtcagctaaatcctgctctgaattatcagcaccaaaagtatcggtgaaggtttgaatactgattgtttgtaatgctttaagttgttttgaggtaactttttcaattgacatggtaaaactcctttatggtttaatagggccgctgttgcccttttttgacttgttcccagtcggcggcaacgttggtgctgactttggttaatagttcgtgtaatacctgggtttccgctgttgttaggccttgcagcgctacctgattggaataatcgttctcccgtttaatctcgggatagatggcttggccggctggggttaaatagagatgtttgattttgagattggtctcatcagcttggcgggtaattaacccggcacggcttaatttttgaatggcacgagtgacagtagcgcggtcaaccttaatcagttcgaccaggcgctcttgaatgatgcctggattttccgcaatgcgaacgagatagagatactggccacgggttaaatcgaattttttgaattcaatattagcaatcgaatctagtgagcgagcgatgacgccaatcggtcttaaaatatctttcacaataatgcctccctcttgttgaatagtagtataaaatatttttattgtaaatgcaacataaattaaaaacaaattattagggtaatttggtggtcaatgctagaataatggagctgacagctattttttaatttaaaatagacgagatttttttaaataaaaggattatagtgttgatagataacattgtgggcaattgattcttgttaaattaagttaatggttaagtcattgaattgtaacaaaaatctctatataatatgggtataattagataacgggcttaaataataggagaaaataaaatgacattcaaaaaatcgattattagtgcagtgacagtaagtttggtaggggtaacaattgcatcaacgcaaccggcctttgcgagctcttcagccgcagctaaagaagccattcaaaaaaatcaagatgacgcgaaagcgctgttaaaacagattgctgccgctaacgaagagggcattaagctagatcaacaaattaaagataattctgccaaaattgcaactcaagaagctgtaattaaagaagcaactgatgaaattgataatctttcgactaagattgacgcagctaaggaagaagtggctaagcggacaactgtgttggaaggccaattaatctcacttcaaaagacaagtggcgacgctgttagtggcaacgtctatgtggattttattctaaattcagacaacctaacggatttggtggcccggacatttaccgttaataagttaaacgaagcaagtaaagaagcgttggcagatgttaatgaatctaaagcgaagttaaccgatttgaaggataaccaagaaaaagctaaagctaaacttgaagctgacaaagctgatttagaaaagcaaaaaacaaacttgttagacttaaaggacaaggcaactaagaatcaaaatgacttaacgaaaaaaattaacgataataaaaaagcattaactgctttgaaagcggattatgacaaagcaaacaaggcagaaactgaaaaagaactcaaggaattagctgcctcagctgctgaaggtgaaaagggaacggatagttcggttggcgaaggtaaaaaagcaacgagttcagcgggtaatgcttacgcttggggacaatgtacttggtatgttaaagctgttgcgccatgggctggtaatagttggggcaatgggaaccaatggggcgcttcggctgcagccgctggttttacagttgatcataatccagctgccggcacaattattagctttgctgctggtcaaaaagttggttcatgggcagcagatccttcatatgggcatgttgcctacgtccaattatatgatacggataagaacactgttacaatctcacaaggtggcttaggctttggtagtcctgctggtcctaatacacaaaccgtttctaacgcgagatcattaacttatattcataaataatttaatattaaaaaaaggatggtccctctattatcggcggatcatcttttattttgcaacgcaatgtttcacgtgagacattgctaataagcgctagattgaagaatggtactttgaatctggtatactggttctaataataattaaggtaacaaactaaaatgagtagtttttggggaggttaaggcttgcgacgattgtttaggttcttaaaagcgaattttcaggcattcggacggcattggagcgtctatgtattattggttgtgagtatcaatcttgttttgacgagtttaattgtgccgggactgacgtggggagtaaaccgtttattagtggttaatggtattggatatctgacctacacgaacttcgtttcagtattgactaaacacccgctcgttttaattagcttggttttgctggtgctgttgatttgcgggttagtctatattcaaatggcttttttattccggcaaatcaaacgaattcaggaacagacgccagcatcacagtggcagcttttaaaacaatccgggcatgacttattgactctgaagcccttaacaatgctgattatgattggttattttctgctgattctaccgtttgggcagattatttttaaatctgttttactaaataaagttaccatcccagcatttatcattcaggatatgtggaccacacctaagatttggggtcccatcattttggtttacacgttagcattgattctgtcgattcgcttaatcacttttttaccggagacaatcttcaataaaaaattatcgacaactcgactcttgcaaaaatgttggcaaacgacgagaggtcggttttggcgtctattaattaaggttggggttctagcaattgcaattacgctagtcggagttttaagtcaactactattctttaatctacaacgatattacgatcaaaatttaccgcattatgcactcttgttagcaattttaaatctttttatcctagaaattatcagtcagatattgttagcgatgagtattgtgatgattttacaactgatcttaaaacaggcaggttatctggtgccgagtgaaacacgcgttaaagtgattttaaaacagcggtcactgagaatacgaatgcgtcaaggcgcagcgatgttattgttgattttagttgccgctggtgtcgccttatacgattatgcttatttagaaggtgcgatggataacagaccagctttgatttcccaccgtggtgttgatgacggcaatggcgttcaaaatacgattccagcgcttcaaaaaacagcacgtgaaaaaccagattatattgaaatggatattcaagagacgaaggatcatcaatttgtcgtgatgcatgataataatctcgaagaattagccggcgttaatcggaccgttcatgagttaacactagccgaattgactacattaacggttcgcgagaatggctattcagcaaaaataccaagtttcgaccagtatctgactgctgcggaaaaggcgcaccaacgattattggttgaaatcaaagtttcgccccaagacagcccacagatgatgactaactttatcaaacggctaccagcgacggctattgaaaaagggcaatcgtatccattcgttgagctatccagtcgtagcggtgttgaagaaacaagcaccgcgcttatttgttagttttatcttgccgtataacatcagttttccagaaacaccggctaatgcttatacaatggaggcgacgaccttgaatgcagcttttatcaatcaagcacatgccggcaaccaagcggtttatgcatggacagttaatgatccagacgtgatgcaacgcttgttactgactgaagttgatggcattatcacggataacttgagtgatttaaaagacgtggttgctgaaaataatgatcatcctagttacgcgacaagactcttaatctattcaagtcagttagctggtttcagtggtgaatccgaaaattaaagcaggataaaagggcggtctaaatgtgtttagaccgccttttttgagagatttctcattgagagcgtttttgttttggaaatttgaatgaagtagtagacgaccttcatattttccgataaagttaatacttatagttaatttgaggagtcgaatgaattcatgacagagaagatggcaataagcgacaaaatactatacggtgggttattagctgccgcagggggctttgattcctatacttttttagtacacggacaagtctttgccggcttacaaacggggaacttaattttgttggggatgcatattggtcaaatgaaatgggcggtattaatgcaacacattacccctatcctagcttttatgttgggaacgattttaacgcgggttgtgcagcatcatttcaaggaagctgattccattaataagcggcaacgattgatcttaggcgttgaaattgccgttttaacggtgattgccggaatctcaccatatattccagacttgttggcgagcgcatcagtgtcgatgattgccgccgcacagttacaagaattccgggaattaaatgggggaccattcacttcattgatgatgactgggaacgtccgaacacttgcagaaagtctctacgatggtatttttaaaaagaatacccaagctcttgataaagcttgggaaattataagaatcattattagctttacattaggtgcagtaatgaccggtctttgtgtctcactattgggtgaacggaccattattttatcagccgtctttttacttgtaaccttattaattttgcaggtgaatccccataaaaaaatctaatcaaatggtttgtcacggaggtggcaaaccatttttttgattagaaaaatgttataattaagcatactaaagtaaagcgaggtttgatcatgaaaaaatcccccctacttatcggtttattaaccattgcgttgctagcgggttgctcaaatcaacaagctaagcaaacagcgtcaactaaaaaagcgaccacggttaagcaacaaacaccaactaagctccaaccgaaagtgagtcttgaaaaggcacgtgagttgtttaaacagcagtatccaaacgcggatatttcagaatcgcagctaaaaaagcaactgaacaaaacggtttatcacttgacgggtttgagtgatactgaagaactagaaatgcagattgatagtcaaacaggtgatatcagccatttaacgaaagaaaccttagatactgatgaacaacatggtgtggctcgtcaaaaagagcggtttgatttcaaatcgttaatgacgcttgaagctgcccagaaaaaagcccaacactattttgatggcgacgtcttagaggcgacccttgaaaaagatgatggcgttgtttattgggaaattgaaggccatcaaaagcaccaaaagatgcaggtaaagatcgatgccacgactggtgaagtggtcgatactgagttagatgattaaagattaataacgggcagtctcctttagtgggggctgcttttttaatgtggttaagcataataaaaagttaggctttgctaactttttatttactttaaattaaatcggtgtacaataaacgtgttacaaggaataaataaagggagtgtgtgtgatgaataaagttaagggacccaaaaagcataagttgattgaatatgctaacgggccatctctggaagaaattaatgggacagttgaagtacctgagggcaaaacattttggaaaacattgttggcctattcaggaccaggtgcattagtggcagtggggtatatggatccaggtaattggtcaacttcaattacaggtggtcagagtttccaatacctgttaatgtctgtgattttggtgtctagtttaatcgcgatgttgttacaatatatggcggctaagttaggcattgtaactcaaatggacttggcacaagcaatcagagcgcgaaccagtaaatcgttggggatcgtgttatggattttaacggaactagctattatggcaaccgatattgcggaagttattggggcggcaattgcgctgtacttgttgtttaatattccgttagtgatcgcggtctttattacgattttagatgtcatgctattattattattaacaaaagttggttttagaaaaattgaagcaattgttgtggcgttaatcgtcgtcattttcgtggtctttgcttatgaagtggccttatcaaatcctgattgggcaggggtaattgttgggttagtgccaactgctaaaacattcgcaacgacgcccaatgtcggtgggatgtcgccactaacaggggcgttaggtattatcggtgctacagtgatgccacataacctctacctccattctgctatttcacaaacgcggaagattgatcgcaacaatgaagaacaagttgcgcaaaccgttcgtttttcaacatgggattcaaatattcaattgacgatggcctttttcgttaacgcgctcttgttgatcatgggcgttgccgtcttcaaaacgggggcggtcaaagatccgtcattcttcggattatttgaagctttatctgatacatcaacaatgagcaacgggattttagccagtgttgcgcggactgggattctatccaccttattcgcagtagccttgttagcttctggtcaaaactcaacgattactgggactttaactggccaagtgatcatggaaggtttcgttcatttacggatgccactttggttacggcggttagtaacacgcttgttatcagtgattcccgtattaatttgtgtcatgatgactagcaacaagccaccattggaagaacatcaagctttgaatacgttgatgaataattctcaagtttttctagcttttgccctaccattttcaatgttaccgttattgatgtttaccgatagtcgggttgaaatgggtgatcggttcaaaaactcactcgtgattcgcgtgttgggttggttatccgtcatcggtttaacttacttaaatatgttgggcttaccgggtcaaatcgaagctttcttcggcgatcacgcaacagcggctcaattagcattagcggatcatatcgcctatgtcctaatcgcagctgttttagccctattggtctggatgattgttgaattatataaaggtaatcaacgatttgaacagcaactcgcggctcaagctgcggaataatttgaggaggggttaagatgtcaattttaaatatgagacgggtattagtcggcgtggatgattcagcagatgcgctattagcctttgaatatgcgattaaacgggccgttaaggatgatttagaattagtcattgtatcggtgctggaaaatgatgagttgaatgtctaccaggctttgaataaagattatatccacggtcaatataatgatttggaaaaacatgttttagattatcaggaacaagcgcgggctgaaggggtcaaaaacgtcagagcagtaatcgctgaaggtgaaccaggcgaagtgatcattaaagaagtgattccaaaggtccaacccgatttattgattatcggctcaaaagccaaagaaggtatcgcgaaatatttcgggagccaagcagcctacatggctaaatacgcaccggtaccagtattggtggtgcgttaacagaacacgttgaaaaggcgttgggacaaagtaacatggtctcaacgcctttttcgtactaattatggtaagctaaatgcattattatagaaggaagtgggataagcgcatggatgaagtggctgaattttgggatgattttgcggcggaatactatcaaattcaaaaggaatcgcaagtgccgattgtgaccgatattgaaaaatttttaacagaacagcgtttgttgccaaccaattcggttgtcgatttaggcggtggtagcggccggtacctagcattgctcgcgcaaaatagtcaacaatacacaattgtggatatctcagaacagatgttacgttatgcacaggtggaaaaccaagtgctagcaaagccacgaccggtgacttatcgacaacaatcggtagccgactttagccaacaaaccccagatcaaagttatgatttagtctggatggcgctcaatcctgcggtaacggcggacgaaaccttgcttgcaattacgcaaaaaagtcggcagtggtgtggctttttacggttaacacagaatacagatgatttatttgcaccactggaacaacactttgggattgctgaagaaaaccccaatatcgagccaacgattattcccgctgtggtcaaactgttaacaagtgctggctatcaagtgcggcaacaaaagtttcaatatcaaacaaccgagacttttgaccgggcatttttagaagcatattatgcggaagtgccgcaagcattgctaagcacttatttggatcaggtatttgccaaccaaaaaacacgtaccagtacgacaatgcttgaatatacgttgttgtattggcacgtgtaaagggaagacattgattagaagccaagtgcaattaagccagttggcaagttttcaactggtacgggatagagtgcaaggccggttttaaccgcggcaaccaataagctgttgagaactggtatctgatcagcgctaatggttgaagatggcgtcagtgcggttgggacaattagtgcggttaattgacgattattgatccgcgataaaataatatcgggatttcccaactcagggtcactatgataagtgttagttgcccgttctgctaaggcaagtgcttcttgccgtaatctttggcgaccatcttttagtaaggtggttagtaactcatcatccgtcagtgattctggggaagtctgaatggtttggtctaattggtaattaacatttgttgctagttctttgaagagattgagattacccggcaaagtcaccacataaattggggctttttgtggcagtagttcggtgagatagcgatcaattacacggaaatagttggtttggtcgatgagttgctcgttatccttgaccacataactatgggtcggactcgagaagccttggaccacttcacctttacggtcggtaccaatgccttcttcaattgtggttggtgcatcggctggtattggatagtcgcgaatcacgttttgttgaatggttttaagactgaagctcgttttgttgaggtttaaaatcgtgccatttaaactaagcgctagttctgaacttaatggccgtaagtcgggatgggcatcgattgtgaagtattcggtattaattggataatgcaaaataagatggtagcatttattctcagtaatatagaaggcaattgattgcacatgagcgagttcttggggggcaatcgataagcaggcttcaacttgttttaaaaggcgagtttgattgggatgattggcaagtagttggtcacgaatctgtttagcataactattcagtttaattttgttggcgctgagtgcttgaccacctgtatctaagttaatgaataatgaaacaacaggctgacttgaatctgtgagtaactgcgttaaactatctggatataacatagaaacacctccatttgattacttcaagcgtatcatattgaaaagaagcagagaaggaaagtgctttctttgatttaagccgttgacttttaagcgcctttcatagggtgattatgctaaaatataggtagcttaataagggaggatacacgcatgaagaaacaaacggcaacagttacaccaaccgcaatcagtaaaagcattagaacgcgtttttttgttttacaaatggtggtcattctcgttctcggaagtgtcaccgctaaaatcgtaagtggttttaacccgttaatgacggattcggaaattcttaataagacaatcttgatggccttaggctcaacggtggtcgcattgattatctggtatgtttcatataaattaattgctttccagattaaacgccaagttatggataaggaacttgaagatcgctatacttttaatttatctcatgctgctagcagtttaagcttacacattgtttattttatcagtattgtcgtgattgtctggttaatgatgagtgcgcaaagtgttcgggctgatttagacgggctgaacctatttaagacggatcaaccaaccgttaaactcgttgaccaacatagtatgaaacagattaatcgcttctataagaagacagataatcagtcagttcaatatttagggagtcagcaagaccgtgcttatttcaaagtagatcaagcaaccatcagtttgccactttctaaagttcaatttaatggtcaagatcaaggaaaagttaaaaatccattgaagattgaaacttatcaattaaaacaaccggctaacaaaaaatatttaaaaccaactatttatctgagtcaaaaaggcttgccaacggtgccagtgacgaagatgtatcagcactacacgccaaaatcaagtgaaactgttcaaaaattagatattgagtaaattaaactaccagattagctagattaaacggctttcatttggtaaagttataagtgagtacttttttaacaaaggagattaataatatgattgaagcagtaaatcttagagcaggtatgacgtttgaacaagacggcaaattaattaaagttttggaagcaaatcaccacaaaccaggtaagggtaatactgttatgcgtgtgaaattgcgtgacttacggactggttcaattgttgaaacaacaatgcgcccagaagttaaagttgaacaagcaatgattgacactaaagatgttcaatatttatatacacaagataacgtggctttcttcatggatcttgaaacatatgaacaatatgaaattcaaacttcagccattgaagcagaattgaaatacctattagaaaacatgaactgcaagattcaattcttcggttcagaagtcatcggtgttacgttaccaacaactgttaacttacgcgttgttgaaacacaaccttctattaaaggggcaacagttacaggttctggtaaaccagcaacaatggaaacaggcttagtggttagtgtgcctgatttcatcagtgctgatgaagtcttagaaattaacacccaagaaggcacatacgttaaacgtgcagcaaaataataaagttttttaattaatgtttaatgcaaaacagttcaccaattttggtgagctgttttttagatgcttgttattaattgcttgtgatttagctgattttttattaggaaatccaatagtgatttgacaagtaagcgcttcaccgttatagtgataatgtaaacgatagttatttaaagtggaggtattaataatgacgaagaaaataattctcgattgtgatcctgggcatgatgacgcagtcgcaatgatgcttgctcacgggaatcctgaaatcgatttgctagcggttacgacagttgctgctaatcaaacgttaactaaggtaacacgcaatgcattagctgttgcgacaatgattggtatgcatgatgtgccaattgccgctgggtgttcacgccccttgattgaagaaattaaggttgcagcagatatccacggtgaatctggactagacggcgttgttttgccaaaacccactgtcgaacttgaaaaaattcatgcagtcgatttaatcatcgatttaattatgagtcatccagctaaaacaattacgttggtgccaactggtgctttaacgaatattgcgatggcagcacgcaaagaacctaagattatcgaccgggttaaagaagtagtcctcatgggtggcggttaccacgaagctaatgcgagtgctgttgctgaatttaatattaagtttgatcctgaagccgctaagattgtcttcaatgcgggctggcaagtcacgatggttggcctagacttaacccatcaagccttagcgacacctgatattgtgtcagaaattaaggccatccatactgaaacatcggcatttgttgtcgatctattggccttcttccgcgatatgtacaagaagggccaaaacttcgatgctcctccagttcatgatccatgtgcggtagcctatgtgattgatccaaccgtcatgactactaaaaaagtcccagttgatattgaactcaacgggacattgacgcgcgggatgactgtcgctgatttcagctatccaatccctgaagattgccaaacatcagtcgctgttaaattagaccatgctaaattctggggtctagttgaagatgcgttgcggacgattggctaactttctaagtaacgggttacggttttaagaagataatcttttgacaataacgggttaacgcttttggcgctttccatacaaattagggcagcggtgtaagcgatctgtgttgttttttcccaacctaggttgtttaagcggctatcaactactgcggctgttaacgcggcactggcgccattattgttaacacgcttgattggaataccagcgattaatttagtgtttcgattatcaatataaaataatccagtatgaggcattagaacataaatatgttctatgcctttttttagtagctttttggcacttttttcagcagttttagcatcagtcacagatgagttagttagcattgcaagttctttatcagttgtcattaatgtatctattttagaaagtacgttttgtaatttataacttttattgagtgaaacagttttaacaaaaataggtactttgcaattgtcaaatagccagtcgattgtcttttcaggtaggttagtatcaataatacagtaagcggaagtattgattgtggctagtcgttcactaaggaaatcgggcgtgatatcgtcataaattcccatgtcatcgacacctacattcagggtgccatctggatcattgacgtaaagataagaagatgtacttttatcaggtattttttttgaatgctggatagcgagatgatttttttgagcatcttcttcaaatttttgcccattcagatcatcaccataaaccgtaataaaataatttggaactgcaagttttgttaaattatgggcaatattataaccagctccacctaaagaaaaagtgatatgcccaggattagaattttgttgaataagtgttgtatcggttaatcctaggatatcaatattaacgccaccaataacggttacaaaatttggctcgttaataatataacctttgccggcaatgtaaccttttttggtgaggttaaaaatatgggcagcgacgccagatcttgttaaaccgaatttatcggccagttcttgttgtgaaattaatggattttctttaattatttttaaaatttcttcttcgcgttttgtcatgctaatccagtccccatctaattagtaagtagcttaagtataggttattaactactgcaggtcaattttaataaacaaaagtttattttataaaaaagtgtttacaaaacgttgcaagcgctttataatgaatttgcatacaggagataaagagacggaggtgtcaaaatggaagataaatatgttgtagtcgttggcggtttgaatatggatattgcgggtatgccaggtaaagattttattgaacgtgattctaatcctggtgaagttaacctgtccgttggtggtgttggacaaaatattgcacataatctagctaatttaggggtgccaacatatctgatgacggtttacggggacgatcaatatggcgcaatattacatcaagaatgtgaaacaaataaaatcaatttagattacgcagccgaaattaaaggcgctaatagttcaacctatctttatgtaactgatggctcaggagacatgttagcggcaattaatgatatgagtatcgttaataatattactcctgattttttaaaggaacgattagcggtaattaatcaggctactttatgtattgtagatgctaatattccacaagaatcaattgaatggttggcagatcatttgaaagtgccgatgtatgttgatccggtttcagttgctaaagcacgtcgttttgaaaacgctttaaataaaattgatacgtttaaacccaatgagatggaagccgaactgctaactggaattaaaatatccgatgaaagctcagctaaaatggcagcagaatatttagttaaccaaggaatccgtcatgtctttatctcgctcggtgcacatggcattctatgcgcagatgaaaggcaaacagtattagtgccgattattaaagtgccaattattagttgtaatggtgcgggagattgtagcatggcaactattgcttgggcgtattatcactttggtaaaaaggcttctttaaaagagattggtcaatatgcgcaagctgcttcaagtattacggtgggaagtgcttcagccgtttcatcacatttaactgcgcaaaatgttattgatcgttgtcgacaagcagtaaaaaattaatttttggaggatttactaatggttaaaaaacaaatttattcacttatcacttatgatgaaagcgtaaaaacgatggaggcaggtgccgatcatattgggcttgtaccaatgcaagatggtggtgtaccagcacatcgagtgccactagaaactgttgataaaatttttgctgaagccaaaagacgtggcgttataacagtagcaatcatgttgaacaaagatcctaaagaaatgttagatattgcgaaacgggttcgtccggacatcctgcacattgctgggatggaatatactgcagatcaagcgtttagagatcaattgagagcggtttgcccggaaacagaattaatgcaagccgtcttggtagatggaccggaagcggtggaacgtgctaaagaatatgcaaaattctcagattacttattaacagattctggtttagctgcagatacaggaattggtgcgagtggcttaacacatgactggtcaattgatgcggcaattgttgctaatgtagatattccggttattattgctggcggcttaggaccagataatgttgaagagtgtattaaggaaattaaaccttatggcgttgattcattaacaaagacaagtattaaatatgatggtggtcgtatggaaaaagatatcgataaggttcgtgaattctgtgaaagagcagacaaagcagccgcagaagttggtttataaaaattgaaaataatatggacaagttttaagacggtatcgctaaagaaaatggcaactgcgatcattggtgtatttttagtctgtgttggagtagcgattaataacaacacacaactaggtaatgatccggtaggaattatttatgatggtattcgacaagctgctcagctttcacatgcgcagttaggcgtggcttccaattatattaatactggtttgatcattattttgtttttctttggacggaaatatattaatgtcggaacacttatctatcttgtaccctatggcttttttatcagcataggtagttatctgtataccgtcgtttttgtaggtaatacgctatggatacgagggttagctggtctagttggttgttctttatattatttagggattagcctatttgttgctagtaacatcggtgtcgatccttttaacggattaatgttaacactccgggacaaaacaggctggagtattcgccgttcgaaaataacaatggatgttgttttgattattgctggcgttttgttgggtggtcggtttggtgcaatcacaattctgacggcattaacaacaggaccagcaattcaatatttaagccaattatttagccaattgttatacggtgagagaatttaggaggataaaatggattataaattagttcaaaagaccaaagtattagtaaccgatgatttacctaaaacgattttgagtattttgaaagaaacacaatataaaaagccattaattgttatggatagttttttaaaagaagttgcaattgtaaaaagattgcaagttaaattgacggagaacaatattcaattctctatctatgataaagtcgtttctgatccgccaacaactgtggtggatgaaggtgctgaattttttaaggcgcaagattgtgatagtttaattgcaattggcggtggcagtgccattgatgttgctagaggaattaatatcgttcgtataaatggtggcaaaattagcgaatacgtcacagcaagtaacgaaataaaagattgccccggattgatagcagtaccaacaacttctggtacggggagtgaattatcgaatgcattaatcgttacggatacagaaaatcagaccaaattagcggtgttagcgaataacgcagttagtgaatttgcagttttgaaccctgaattagtaatgacattacctaaagggatgacaattgcaacgggcttagatgcattttcacacgcggcagaaggttatacatcaaccttagcgagtcctgtcacagatgcgatttgcgaaaaaattatgtatttactagtcaaatacttacctaaggtaattgaagatggacaggatcgagaagcacgtgaacgtgtgatggtcgctgctacactaggtggttggatgctaaataatgcagggacacatgctggtcattccgttgcacatgtgattggatctaagtaccatatgccccatggaatggcttgtgcttatgcgttgcctagggtacttcaatttattgcaccagttagaagtaaaaaagtaaaagaaattggtttgattttgggcgctgaataccccgcagatccaacagataccgaaatcggtagaattacggctattcaatatcgtgaatttagagataaagttcttggaatgaagccattcactgattttaatatctcagaagatgaattactaactaatatagaaagtgtcgttaatgaacgttttgcgggaaatacacctaagcaaattgatcaagagggcgcaatgatgttattgaaaaactttggctagataactgaaagtggaggttattatgagtatattaatggggatagtcggattagtctttatatttgcgattggttggttagtcagttccaaccgaaagaaaattagatataaacaaattggtattttattagttacccaatttgtgatttccttcctgtgtttacatacatcaggtggggttaaagtgttggcaggtatttctaatttctttagttggttaatggggcaagctgcaggtggcgtcgattttgtttttggtggcgttgtaattaagagtggcgcttcagtcttcttcctcaacgtattgatgccaattgtatttatttcggcgttagtcggcattttgaactatattaaggtcttaccatttattattaaatggttaggaaaaggcattaataaattatcaggaatgggtgaattagaaagttattttgcagtttcaacagctgttttggggcaacctgaagtttttctaacaattaaggaacgaattcctaatttatcaccacaacgtttatatacaatctgcgcatccgcaatgtcagcggtaagtgcggcaatgttggcttcttatatgaaaatggttcccggtaaatttgttgttgtcgctgttttcttaaatattttttcagcccttattatttcatgtattgttaatccgtatgaaccagaagtagaggatcaaaaaacgatagaagctcatctctccactgaaaaggaaccattcttccaagttttaggtaattatattgttgatggttttcaacttgccttaaccgtagcagcaatgttaattggatttgtatcattagtaacgtttttaaacaatacatttggctttttctttaatgtcactttcacggatattattggttgggtatttgcacctgtcgcatttgttattggtgtgccagctgacgatattgttaaggttggaagcttaatggccacgaagttaattacaaatgagtttgttgcaatggggaatttatcacagattgcacattccttgagtccaaaagcaacagccattatctcgacttatctagttagttttgcaaattttggaacgattggtattatttcaggatcaatcaaagcaattgatcagaaacaaggtgctgttgttgcgaaatttactatgaaattattgttaggtgctacaatggcttccatgctgactggtacgattgttggtatgtatttttaggaaagaaacatctcttaattttaataagagatgtttttttattttaatagaaaatggtatactatcgtatgtaaccgattgcataaaaatacagataaagagggcgtttaagcatgtataacgcaaaagaaacgcggtatgacgatatgatctaccggcgtgtcggccattctgggttgaaattacctgcaatttcattagggttatggcataactttggtgaaacagataaagtggctactcaaaaagaaattatttttggggcctttgatatgggcattacacattttgatttagcgaataattatggtccaccagccggtagcgcggaagaaaactttggtcggattttgcactcagacttgaagcaatatcgggatgaaatgattatttcgtctaaggcgggttattatatgtggcccggcccttacggtgaatggggttcaaaaaagaatttaatcgctagttgtgaccaatcattgcaacggatgcaattagattatgtcgatattttctatagtcatcgaccagatcctgagacgccgattgaagaaacggcgcgggcgttggatttattagtccatcaagggaaggctttatatatcggaatttccaattattccgctgaacaaacaaaagcgattaccaaaatttttagagaacttggcacaccatttattattcaccaaccacgttacaatatgttggatcggtggattgaagatggcttaaccgatgtcttggctgaagaaggtttaggcgcaattacgtttagcccattagctcaaggcatgttgacgaaccgttatttaaatgggattccagcggattcacgtgctgcccgtccagatagtccattcttatcacctgaaaaggtcgaccaaacaatcagcactgttcaagaactgaataaaattgcgcaacaacgtggtcaatcattggctgaaatggcgcttgcttggaacttgcaacaaccaaccgttgcgagtgtcttggtgggtgcttctagattgagtcaacttcaagatagtgtgcatgcgttagacaacttaacgtttgcacctgaagaattagcggccattcaaaaggtattaaaatagtaaaaaggcgttagggcagatgtaattttgccctaacgcctttttactattcaaatgtgcttattgaaactgacttctgcgcttagtgtcactcgtcaaaccgtttcaaacacactttcttttttattcagctgtttctgcagttgctgcgtttgcttggattttgccaagaatcgcacgtgagaatggtcccactacgattaattgaagtggtaaggcaacgataatgttcattgcccaagcgtgtctgtaagcaccgccgagatcgtttggaatcccaccttcgattaatacaccgaagagtgacatacatgtgaccataccaagaatcatcaaacatgaaattgttaaaatcatgactaatttattgtccttattaagtggtaagctgaatgcaatttttttagcgagtacgccgatcacgaaaacatcgaggatgaaagctacgatgaagccaggaatcaagccggtgattaaagcgacaaatgaaaaactcccgtgtaataataagttatagatactcattccaagtaccattgagaaacacattaatgttgtaaaaataataccttcttttttattggtaggcatatcaatttccttctttctgaaaagttaacagatataaccgtatcacataaaaaattttggcgtaagtttttttttcagaaaatgagaagtttcttcattttcaatttcgatcggaatttcaccgttatggacggcatggaaaatcgaaacgagtaacaatgcacagacaaaaatcagtgggaagcccgcaatcacacaaaccgcttgaacggtttggaaactaccgacgagtacaattccgagtgaaaataaaatgaaaatgacaacccaagccatccgattccaacggttaggttgttcgccaattttcaattcaagactagtaaatgacgaaacgatgaaggctgatgatgaaatggtcgtggctaggaaaatgaaacaagatagacagaaaatcgcgagcatgacaatcttccaaggaagtgtcgtaatgacggccgcgataacggcggcttggccttgtgtgttcaataaagtaacaaggtcaacttgaccggaactttgtaagaagagggcgtaaccgccgaggatggcgtaaaaactcatacaactaagcgcaccataagtggccatcccaagtagcacttggcgaatagtccggccacgagagatgcgggcaatgaacaagcccatcacaggcatgtaagataaccaccaaccccaataaaagagcatttcgtgttgggcgaaatggctatcagaaccagttgcgtttaaactgagttgcccaaatttaccaaatagatggaaaagattgtgaccttcagcaccaatcagatgacgggtggggccgattaataaaacgagtaataaaaagccaatcgcggtgtaaatatgccaagcgctcagtttcttgatccctttatttaacccagcgtagacggttaaagtgaagagaatgaataaaacaacgaacaaggctagttttaaccagatagtatctgaaaaaccagtcatcgtgctaaggactttagaaatgacggggatttccatcccaattgaagagccgattccgcccataatcccgaagacgacaatgaagtcgatgagttggcggagaacctttttgtaagtttgagggccttctaataaatcgatggcggcactcaagcgttgaacgcgtaaattcttaacatagagtgcatagccaatcgcaattgtggcggtggcaaaaatcatccaggccattggtccccagttaaactgaccgcagacgttagcgtagcggtaagccgctgctgaaaagggcttagcgccaaatggtggattttgtaagtattggagtggatccgtggtgctgagcattaagatgctggcatcaatcccagtggcaaaaaccatgctaccccattgaaaatcgttatattcaggtttttcgttaggttggcccaaacgaatccggccatagtgactacagcccaaccaaactaaaaagatgaagttaataatataaatacctatgtagagccattgggaatgggacgtcatcgtgtccaataattgcgaaatagagtgctggagtgtgtcacctcctaacattagaaatgcggagacaatcccgaacaataacatcgtggggataaagacgactttatcaacattcttacgctttaaaataatgttcctcctgtgtttgttaaagtctaagttgtttagtcaaaataaaaagcgcccatacaattggtcaactgaccacctgtacaagcgcgttattataacgtatacaaatgaaaaaacagcctaacttgatttacttcttcttatagcatagcacttatctgagatttgttaagggtggattaaaaagattagcaatcagcggtggcaagccattttaggtaatcctgttcacgattaatcgcatgttctaaaatcagatagtggccataattggcagtaatcgttgcttggttagggaagacaagcgctttgcgggccaataaatgggtgagcttatcggtgtgcaaggttgtttgttccgcaaacatagcaggtaaatgttgatcattttttgattcgataaaatagagtttgaggatgaattcatccttgctagcgagaatttcactggtgggtgagtagcgccactcgttgaaataactaacgccactaggggtaattgtgtattgtttcttcatgagtttagtgccagaaatgagttcgatatgggtaatcaggtcttcggtttcaaggcgttttagttcgggatagatttgactgtgtttggcctgccaaaattcaccaatttcattttcaaaaacgcgtttgaggtcgtatccagttttgggcgcctgatttaatagaccgaggagcaagtactggagaatatttttctgtgccatatagaagttcctttctgagcgaaatcttagttaaagtatagcataggggagcgaaatcgttgcaattagaatatagttactttttgtaagtctttttaattgaatttcgagtcagtttggtataggatagctgaattgggtgtctaatcaggctattttctgagggagatagcaataatactaataatagaaggaggccatttaatggctaagaaatcaaagattgcaaaattagcaaaacaacgcgcattggtcgcaaaatatgcggatctacgcgcgactttaaaagcggaaggcgactacgctgctttagcagaactaccaaaggattcaagtccagtgcgtctacgtaaccgggacttaattgatggccgaccaagaagttttatgcgtaaattcggcatgagccggatcaatttccgggaattagctcacaaaggccaaatcccaggcgtcaaaaaagcaagctggtaaaaaagtaagtgcgttaattcacggttagcttttgaggatttgcataatcagacggataagcgccaagggcgattgtctggctgatgtagcaaagcgcagaaagttgtgaattaaaagcacgttaaaaaagtaagtggtttccagcatagggatatttcgaggattagcatagctgcgtaaataaacgacgaagtcgcttatttgcgtggcgtagctaaccggaaaaatatatgctgaaaagcacgttaaaagaatgagtgctggaaaagccggttaacttacgaggattagcaaaattagacgaataaccagctttgctggttgtttggctaatggtgctaaacgcagtaagttggctttggaagcacgttaaaagctaagcacaggaacctaacttgaaaaacatgttaaagaggtctcttcgagacctctttttctatgtcttgaacttgcaacgtttttttgatatattggtaggaattgtttaacaagtcaactaaattaaatgaggagggttgaagatgagttattcacaatttatccaaagtgcgaccgtaagtgactaaagacgtttttcagcagattaaattaattaggagttttaaaatgaaaaacgtctcaaaaaaagcccatcaattctattaatgattgtgttggtgggatttccacaaattagcgaatcaatttttacacccgtcttaccgatgattagtcgggcctttcacgtcagtgcgcaaacggcacaattgacgatgagcacctattttatggcctttacctttggtgttttattctggggttggttatccgatcagattgggcgacgactaaccatgttgttgggaatcggtgtctatctgcttggtaatggcggcctgctattagccggtcattttagttggttaattctagcgagattagtgcaagcttttggcgcgagtgttggttcagtggtgacacaaaccattatgcgtgaatccttcagtggtgtgcgcggggcccaagtatttgccaaagttggtgcggccatggcacttgcaccagccttaggcccgttgattggcggtcttgtccaaacctattttggttatcgccaagttttctcggtgttaattatgatggcggttggcgcgattttatacgcgggtgcgtgtttaccagaaacgcggccagctggtgtgccggcacaggtcaatatcggggcagtgacgaaacggttactaacggataaaaaagtctgggtttacggggccgtgattagcggcatcaacggcattctattcagttattatgctgaagcgccgtttatctttatcaatcatttccatctcagcacggttcaatatggctggttaggccttgtgttagccgctgctagcattttaggcgcaatgactaccaattacggcgcacccaagtttggcgcggtgatgatggctaaaattggcttagtactcgctttaatagggagtctattattgttggttgccagttattatgatcagctgttgttgatggtcatcttaattctaatcgtcttttgggggttgaatacgactttaccagttgttttaaacctggcattagtcggttatgaagcggtgattggcactgccagtgggctatttagttttggttattaccttgcaatcagtgctttgacttacggcatgagtttgttgcatacaggcgcaatcagtcgattgccattgtatatcgtaacgattgtcgctatcatggcactttggtatgggttagtgatccgaaataacgaagagtaattaaaaaggacctgagacaaaagcaattttgtcccaagtccttttttgatggttaagaatggcgttgttgctcaaggccagctaggaaaatatctaagcccaacatgaatttttcggcggagtgttgctgctgttgccggtggtgttcgaacgtttttaaaaaagcgtcgaaatgattgtcggcagcgattgttttcatcttcagcgggagttgtgcgagataaggatcagtttgactgagcgcgcgttgcttcatctcaattttccccgcgatatcagcgaagaggcctgacatgaagtggtcgatggattcaatcgccaggttactttgttcgggtgtgaagccggcgtctaataagatttgtaagaggcggttaatgagacttaggcggattttggtcgcagggacggtccgcaacattaattcggctgcgtaaggctgttcaaggtaggtggcataaattgttttgaagatcagcttgatttgtttcgtccaaggcatagccgtcgtcgttggtggaaattgaatcccggcgataatctcgtcagccattgcttgaaggagggcctgtttgttttcaaagtgccaataaaaagtcgcgacaccaatgtggagcttggccgcaattttacgaattgagagttgttcaactgtcccgcctgtttgcataatttcaaaggcagcggccgtaatttgggctgctgaaattgtttgtttaaccatcttaataaaccgcctttatttttcagaaaaaagaattgtaattatttttaaaatttgttaaagtattaactcgaacactgttcgattatactgtacatgacttgtacaggctaatcaacttataggaaaaagagggatgcgcatgtcgttattgaaacagcacttgaagccatatctaggcgtttttagcctatctatattagccaccattatatctgttgcgtcttcactatggcaaccaaaactattacaaaacgttttggaaggcattatgaaagatgatcaagataaagtgatgcaaattgggatttatctcatcgtgattgccgttgtcggtttaattgctggggtggtcaatacgattacgtcggcgattaccgcacaagggatgaccgccgatattcgggaaacgacttttagaaagattcaaactttttcatttgctaacattgagaaattctcagttgggaatctttctgtgcgcttaacgaatgatatgacccagattcaaaatgtgattatgatgtccctccaaacattggtccggattccgattctatttgtcgggagttttattttagcgatgaactcaattccgagcttatggtggattatcatcctcttagtggtcctcgtttttgtgattacctttttatcaatgggctcaatggggaagcactttggtgcgattcaaaatttaatcgataagattaacaacctcgctaaagaaaatttaatgggcacgcggattgtgaagtcctttgtccaagaagataatgaaattaatcgcttttcaaaaaccagtgaccaattagaaaaacatacggcggttgttggaatgctcttttcagtgatgattccatcatttatgttggttgctaacttggcagttgttgcttcaatttattttgttggcaacttagtcgatacagatccggaagcaatcgctgcaattgcctcatttatgaactacttaatgcaaatcatgatgtcgattattatgggcggcatgatgatgatgatggcttctcgtggggcggtttcgttgaaacgactccaaaaaatcctctccacagatcctgatattgtgtaccctgatgtgccagatcaagacttagctgggaccttagcttttgagcatgtcagcttccgttatccagaagatgatcatgatacgttgaacgatattagttttgaaattaatgcgggtgaaatgatcgggattgtcggcgcaactggtgccggtaaatcaacgatggcccaattaattccgcgtttgttcgatccaacaaaaggggagattcgtatcggtggggtcccaattaaggaattgaacgaacataacttacacgattcagtgtcattcgtgcttcaaaaagcgattcttttctcaggcacgattgcccagaacttgaagcatggtaaaaaagatgctggtacggctgatatggatcgcgcgactggcattgcgcaagccaaggaattcatcgagaagttagccgatacgtatgatgcaccggttgaagaacgcagtgccaacttctcaggcgggcaaaagcaacgcctttcaatttcacgtggtgtgattggccaacctaagattttaatcttagatgatagtacgagtgcgctggatgcccattctgaaaaactggtaaaagaagcccttgatcgagaattagccgatacaacgacgttgattattgcgcaaaagatttcatcagtggtcaatgctgatcgaatcttggttttagatgaaggtcgcctagtcggtgtcggaacgcatcatgagttgttagaaacaagtgctgtttaccgcgaaattttcgaaactcaaaagggaaagcgaggctaaattatgaaagaatttaaacgtgccatggtctttttctaccattatttaaaacgctataaaccatcttttgcgattatccttgtgatgaccgtctttgccacttatttacaagtcaaggcgcccgaatatattggggatgcactgaatgaactggttaaatacgccacgaagtttcaggttttaaaagcccagcatttaccaaccagtggggcttctaaagatgcttttattgatgtcattgtgtcgttagtccttttttacgtcttgagttcagcggcaacttttgtctcaagcgccgctttttcacgcgtcaatgcgttatcgaccaaccggatgcggattgggttattcaataaattacaaaagatgcagattaaatattttgaccgccattcagatggcgatatccttagccgttttacgagtgatttagataatatttataacgcgatgaaccaagtgttaagccaattggtgtcggggacggccttattgattggtttgctaattatgatgtttagaaaagatacccaattggcgtgggtcacaatcgcgtcagtgccaatttcgtttattttagcgtggatcattatcaacaaagcgcaaaaatacgttaatgtgcaacaagatgaagtgggtaagttaaatggttatatcaatgaaaaaatcacaggtcaaaaagtgattattaccaacagcctacaagctgaaacgattgatggttttgttgaacataacgaaagtgtccggaaagcgaccttgaaaggccaaatttattcagggatgattttcccattgatgcaagggatgtcactggttaatacggcgattgtgatcttctttgggagctggctagcggtcaacggggatatcaaaaaatccgttgctttaggattagtcgtgactttcgtgcaatattcacaacaattctataatcaaattgcgcaactctcatcaagttacagcatgattcaattggcaattaccggtgcgcgccgggtcaacgaagtctttgatgaagatgatgaaattcgtccaactgatgggcaacaattcaacggaattgaacgttcagtaacgatggaacatgttgattttagttacttaccaggcaaacaaatcctgcacgacgtgaatattgaggttgataagggccaaatgattgcgttggttggaccaactggctctggtaagacgacggtcatgaacttgatgaaccggttctatgatgtggatcaaggcgccgttaagattgacggcgttgatatccgtgatatggatttggatacgttacggtcacacgtggggattgttcttcaagaatcagtcttatttgcagggacgattcgcgataacatcgtctttggaaaaccagatgcgactgacgatgaagtgattgcagcggcgcaacaagcgcacattcacgatttcataatgacgttggaagatggctatcaaacgaaggttagcgaagaagacaacatctttagtacgggtcaaaaacaattgatcagtattgcgcggacgattatcacggatccagcgcttttgattttggatgaagcaacaagtaacgttgatacggtgactgaaagccatatccaaaaagcaatggaaaacgtgattcagggtcggactagttttgtgatcgcccatcgcttgaaaaccatcctaaatgcggatcggattatcgtcttaaaagatggccgaattatcgaagaaggcaatcatcaagaattactagcacaagaaggcttctacgcagaattgtataacaatcaatttgtatttgaataagagtgtgagttcagccggttatatcctgaggattagcagtggattgcgaatgagcgacgaagtcgatcatttgtgattcgtagctaaccggaaggatatggctgaaggaacacgtttcaagcctccaaaaaatcccggttcagccattttatattggctgaatcgggattttttgattatgcgtttaatgcattcggtaaggtgccaagtgcactgagcgttaagcggtgtgtcgctcttgaaatagcggtgtagaggcggttacgccccactgttggttcagtgtagtagtcattgattaagtcgtataacaagacgttatcaaattccaaacctttagcgagtgttaatggtaatgtgaaggccccactttcggggagggtggtcgtttctgtggataagtggtggacatcttttaattttaaaaggcgctcatcaaactgaccggcgggggtgataatcgctaatgtttggtcagtaggcagttgctcgatttgcgcttggatttgtgccaggtagtccgtatcattagtcgcactcagataagttggttgaacatcgtgcggttggaccgcgtgaacatcggttaagtcagggaatagctgactgaataacgcggtaatcgcaccggatgagcggtaactcgtccgcaatgcttaggtttttagattaggaaaaatcgcgggcagtttactgaattgaattttatggggtgtgagactttgatgttgatcaccgaagacggtgaattgcgccttggggaaaagctgtttaaaaaggtgtaatgagctagcgtgatagtcttgcacttcatcgatgaagacttgtttaacttttgggaaaacgcgctgcgttaaataaccgtaaacttgtgccgcaatcacggcatccacagttgattggcgcgcaataatttggtcaaaggctaaccactgataatcgtgcaattgttcagataaatcttggtaatcatagcggaccatttttaaagcgagcggtgctaatggttcgtcttcgcgaattaagcgtccgaaggtttgttgctgttcggtttccgttaagctttctaaacgtgttaaagtcgtgggggttttggcaattgtcattaattgttcctgtagataacttgtgagttgttgttgggtggcttgaatgcgtttgtccaatggtgcatccaccggcgtcttcaagaaaaattgataactagtggcggcgtcaattgtgaagggtaaaccgctatttaatgactggaagtcgcttacttgcaatgttagttggtcaattgctaggggtaaccggttgtgctgcaatcggaagatctgccaactcttctggcagcaactgcgctaatagttgttgcaaagtgaggttgaccagtgtttgttcaccaaaatctggtaaaacttgggcaatgtaatcctgaaaaagacggttaggtgaaatcatcaacacttcgttgagcgctagttccttacgttgtcgatagaggagataggcaattcgttgaaaaataacggacgttttaccgctgccggcaatgccatcgattagaaggtggtcagtcgtttgttggcgaataatcgtattttgttctttttgaattgtcgcggtaatggcactcatctgggttgttttagcttcttttaacgttgctaataatagtgggtcttcaatcgcgatttgggtatcaaagaaatcaattaattgatcagcttgaatttgaaattggcgtcgttgatttaaagttaccgggatttggcggccattagcttggtaactcgtggggccgaatgtctgttgataataaacatcagcgattggtgaacgccaatcaaaaataacaggttcgccatcttgattggtataactagctgaaccaagatagaagtcctcactgtcagtttcttccgggaaggttagtgtgattttggcaaagtagggttgttctaagaggcgtaacgtttcgtcttttctagcgagcaatgaatcagttttgaggttgagcatatcgatttctttattgatggtttctagagcggcaaaggtgtcgaggttatcagcatatgaatcaaaattgagtttagcttcaccggtaatctgggccttgatggtgttgccagcctgatgattctgcgattgggcatcgttgatggccgctaaagtggctgttagttgttgataaattgtggttaggtgggtttgttcttgttcaaaatcggttgtcatacaatcagccccttataaagttgtttacctagtgtagcaagtccaatatgaaaagaacagtcttgtaatcacatgaaaaagcgtgcataattaatatatggaagagtggtaattgctctaaaaacggtaaaaagaggtgctcccaaaattaactttgggagcacctcttttggtgtctctttgaaagggggcacgctagtcgaaacgtgccattgaagctagatttctgcgcttaacgacgattgtcaaactagcgattacatcgctaattcgccactctatgttaatgctcaaaatctgaccaagcttcaagagcactctagctaaaacgtgtcattgcaagtagatttctgcgctttgctacgtcccgcaaataatcgactgcgtcgcttattcactggcctaggcaaatgctcaaaatctaaacacttgcaaaggcactctattctaagtagtccttctttaattgcgctatttcttctgatttgagggccattgcttgggctaagtagttgtccatattgccgtaatggtgttcgattgtttctctgacgagttcgagatgggcttttgaaacgcttttgccattcattgcggcgacttgggcgtcattgctgctgatgcgagtgggcgcggttgttgttaaacctaggacttcgtttgaaaggacgaaatcatccgcaatggttgcccagtctacgcctaatgcgctgaggatgagcattgtaccaatcccagttcgatctttgccagctgagcagtgataaaggaccgcaccgtcattgccatggttattcaataatacggtaaataggtcgcggtaagctgcttgtgcgtgagagtctgtgactaattgttcgtacattcggtccatgcttgaacgttcgggtgtagcaggttcttttttaccgaagagatgaaataatccctttttcgctggttttttaggggcgtctgcttgatcggtgaacggaaataccgaaagacggtgataggttaattggctgtcgtcaaatggatctggggcaaccttaatttcatgacgggaacggaagtcaacatcgtaagcaacgccgtaatttaggaggtcctcaatgtctgttgcggttagtgcgttaagactgcctgagcgcagtaatttatgccatttaacggtcttaccgtcaacggttggataaccacctagttcgcgaagattatagctacgtgttaaatttaaaacccgttgttgttcttgcatgccaatccatcctttgtaataagttacttctattgtataacgaagattgatgatatgcacctttattttgaatgttcggaaaccgtttaaagacaattgatcgtaaaataagtttttagtaagagcccattgacctttactgaaaaatctgctaatattttatcaaattttaaatcagttaatcatgatggttaatacgaacatttagttgattgatggccgattaagttcatgaatggaggaagattatgtctgcgtgggaatcaaaatttacaaaaaaagggtttacgttcgatgatgtcttattagtaccagcggaaagtcacgtattaccaaatgaggttgatctaggagtgcaacttgctaagaatatcaagttgaacacaccaattatgagtgccagcatggataccgttacggaagcaccaatggcaatcgctatggcgcgtcaaggtggtttaggggttattcataagaatatgagtatcgaacgccaagcagatgaagtattgaaggttaaacgttcagaaaacggtgttattattgatccgttttatttaacagcggacaaacctgtcagtgctgctgaagatttgatgcgcacataccgcattagtggtgtcccaatcgtttcaaatctcgatgagcttaagttagtcgggattattacgaaccgtgatttacgcttcatctctgacttctctgttgaaatcggaacggtcatgactcacgaagcacttgtaacagcacctgtgggcacttctttagaagaagctgaacaaatcctccaacaaaacagaattgaaaaattacctttagttggtgatgatggtcgcttagcgggcttaatcacgattaaagatattgaaaaagttcaagaattccctaaggctgctaaggatcaatatggtcgcttattagttgctgctgctgtcggtgtcacaagtgatacttttgaccgtgcagaagccctattaaaagctggtgctgatgccattatcattgatacagcgcatggtcattcagctggtgttttacgtaaaattgccgaaatccgggctcgcttcccagaagcaaccttgattgcaggaaacgtcgcaacagctgaaggcacaaaagccttatatgatgctggtgtggatgttgttaaagttgggattggccctggttcaatctgtacaactcggattgtcgccggcgttggtgtcccacaattaacagccatttatgatgctgctagtgtcgcccgtgaatatggtaagacaattatcgctgatggtggcattaagtattcaggtgatattgttaaagctcttgcagccggtggtaatgccgttatgcttggtagcatgttagccggtactgacgaatcacctggcgaatttgaaatctatcaaggtcgtcgtttcaagacttatcgtgggatgggtagcttggctgccatgtcacacggttcatcagatcgttacttccaaagtggcgtgaatgaagcaaacaagttagtcccagaaggtatcgaaggtcgcgtagctgccaaaggcgcacttggcgatgttatctaccaattacttggtggtttacgttcagggatgggctatgttggtgctgctaacctccgtgatttacaggacaatgcacaatttgttcaaatctcaaacgctggtttaacagaatcacatccacatgatgttcaaattacaaaagaagcacctaattattcagcaagataaacctatgttaaaatgaaggcgctggggcaaatttaattttgtcgccggcgtcttttttatggatggatttaaagaattctttacccttaccaatccgattctttgttacaataatagcgaatcactcaaacgtgtttaaattaaatgaggtaattaatatgaaaattctaattgttgatgatgataaagaaattgttgaactactcagtatttatgtcaaaaatgaaggttatgaacccattcaagcttttaccggcaaggaagctttgactaaaattgccactaacccgggcattgatttaatgattttagatattatgatgcctaatatgagcgggattgaagttatcaaagcggttcgcaaggattcacaagtgccgattttggtggtttctgccaaaacaacggatatggacaaaatccaaggcctcatcacaggtgcggatgattatgtgtctaaaccattcaacccgcttgaagtgatggcacgtgtgaaatcattattacggcgcagccaacaacaggtgacaaacgaagtgccggatatcttagaagttgggccacttgtgattaagcgcgattcacatgaggtaacaacgattgcgggcaaacaaatccaattaacggcgcttgaattcgggattttatatcttttagcgagccatcctaaccgggtcttttcagcggatgatatttttgaacgggtttggaagcaagaaagtatcgtgtcagctaaaaccgtgatggtccatgttagtcatttacgggataaaatcgaagaagcaactgacggggaaaaagtgattgaaaccgtctggggtgtcggatataaggtcgaggtctaatgaacgaatatcaagtcggacaagattttaaaaaagtacaactcactgccaaagagaagagtgagctgtttgctgaggggatcattacggtgatccttttgttgttgttaaatttatcaattatggtcctattgcaacaagcaatcgttaataatccgcaattgcgcggtggcgtttggatgattaaaaatgcgattgcgattggccctaatggttggcatatctggagttggcaaaactggtttgtgattttgatgggaattgcggatgtgctagtggtttattggcgcttaattcgccgctatcaccaaatgcagatgtggcacgttattggtgaattacattacatcgctgatggtcatctagaacaccgcatcaacttgcgggttaatcgcgatttgcaacgcgtgattgatagtgtcaatacactggttgatagcacggtccgctcaatggaagaagaacgcaaaattgaaaagagtaaggatgaactgatcactaacgtcagtcatgatttacgcacaccattaacgtccattattggttacctaggtttaattgaagataatcagtatcaaaccaaggatgaattaaccaagtacacacatacggcctatgtgaaggcccaacaaatgaaggtcttagttgaagatttattcgaatacacaaaggttcggcaaacttcaacgccaattgctaaaacgacttttgatatggaacaaatgctagaacaactagcggctagctttgaattagaagcccagaagaaaaatatgcagattacagtagaatgccaacctgcaccattgatgatggaagctgacaccgaaaagttgggccgagttttcaataatttgattgccaatgcattgaagtatggcaaaggtggcaagcaaatcattttatcagccgaaaaggttggtcaagaggcaatcattaaagtctccaatgatgggcaacaaattccaagtgactcattaaatcaattgttcgatcgtttttatcgcgtggaagcatcacgttcacaagaaacgggcgggacggggctcggtttagcgatcacgcaaagtattgtagccttgcacggcggttatatttatgcagattccaccccagaactgactagttttgtgatacacttacctttaaaactaggacgtcagattgaacctcaaaatggcgccgctaaaaacagttaaggagtagcattgtgtttaaaagaatattacaggttttaatgactggccttttattagtgaccccagtggctgttgcgacaagtgcaacgcaacagggtgttcaagcggctacggccactagcgcaccgcaggttgacgctagcgccgcaattgcaatcgacccccaatcaggacaggtcttgtatgaaaagaatgctgaccaagtcttaccgattgcatcgatgactaagatgatcaccgcctatattgtcttagatcaaattaaacaaggtaagttgaagtgggagcaaaccactaaaccagacgctgccatttataagttgagccaggacaaggaattaacaaacgtcccacttcaagctgataaggcgtatagcgttcgtgaattatatcaagctatgttgattgcttcagcaaatgatgcagcaatgatgctagccaatttagtggctggttcacaaaagaacttcgttgatttgatgcgccaaaaagtcagtcaatggggcattaaggatgctaagttatattccgtttcagggttgaataaccagtatttaacaggagagacgtatccaggtagtgccgctgatgcggaaaacgaaatgagtgcttcagaagtcgcaatcgtggcccaacacttattgaagactttcccagaagtgttagaaacaactaaacaaacggcctttacgtttggtcctaagacgatcgacgaaacgaagatggccacttggaacttaatgttaccaggccaaaataatgcgcccaaagattacgttgtcgacggtttgaagaccgggacaactgataaagctggcgattgttttaccgggacggctactaaagatggccaacggattttaaccgttgtaatgcacgctaatggtagtgacaaagggcgtcgttttattgaaaccaataaagtgatgcaatatgtttttgataactggcaacaaacgcaactcgtcaaaaaaggggcaaccatcaaaccttttgcaacggctgatgtgaagtatggtcggacgaagactgtcgcacttgaaacaccgcaagcaattgcaatgtgggttcctaaaggcacacaagttgctaatgttgattgggattatcaagtggttcaaggtggtcaaaaacgccaactaacggctcctgttaagaaggcggccgtcatcggtaaagtgacaccgaagattgcgggcgtgacaaaccgttacttagggacgacaccgcaatatacagtacaaaccaagacggctgatccaaaagctaatgtctttgtcttaataggtacgggtgttcgtgaatttttcactaatttattctaattaaatcagaggaatgcttaagcgagaatcgatcgtttaagcattctttttttagtgataataacgccgatttgtcagcattattcaatcggtttaggcttgaatatgctataattaaaccaattcataatgagtctaggaggacgaaaatggctttaacattggatgcatgtacattaattttaaaagagcatcatttactaaaaagtgtagccctcaacggggattcaaacttgaatatgacagggattgcctatgattcacgtaaggtgacagcagataccctctttttctgtaaagggaatttccgccccgtattcttaacgaacgctaaagaagccggcgcggttacttacgttgcagaacaacccattgttgaaggtaacgggatgaacgcgttaatcgtgacgaatgtgcaaaaggcgatggctgtcttgtcagctgccttttacgattatccacaagacgacctcttcatcgtggcgtacacggggactaaagggaagacgactgcttcttacttcacacaatcaatcttacaagatgccactaacaaaaaaacagcactcttttcaacaattgatcgggtactgggacctaaacctgaggaccgttttaagtcagacttaacgacgcccgaaagtttggacttgttccacgatatgcgccaggctgttgaaaacggcatgacgcacttggtaatggaagtgtcatcacaagcctataagaaaaatcgggtttacggtttaacatttgatgtcggtttcttcttgaacatttcacccgatcatgttggtcctaatgaacatcctaactttgaagattacttacactgtaaattgcaattactcgttaattcacggcactgtgtgattaacgcgcaaacacaaaacttcggtgatgtgtacgctgcagcgacaacgacaactgaaccagaaaatatctacttatttgcggacacgagttatcaaccagcacaaccagtggacattgatttccgctttgaaaatcaagccatgactttagctgaaagtcgctttaaagtaactgccgtttctaaaaaggcgattcaattaggcgtttctggagattatcaattacggctgattggcgattttaacgaaagtaatgcgacggcggccattattggtgcagccttaggcggtgctgatttaatcgctgcccaacaaggcattcgtcgtttgcagattccaggccggatggaaaccctagcggttgaaggtcatggtcaagtttacgtggattatgcccacaattacgctagtatgaaggcactattgagcttccttcaaaaggaatacaatcaacctaagttactagtggttgttgggagtcctggcgataagggggtttcaagacgggcaggctttgcgcaagtcttaaacgaatatgcagatcgtgcgattttaacgaccgatgatccgggttatgaagatccagctgccattgcggcagaaattttagccggtatcgatcaagataaggttgacacgacggttgaaatcgatcgtgcaacagcgattaaacaagctatcgaagaaagccaaccaggggacattgttgtattggctgctaaaggggcggatgcctatcagaaggtgcgtggtgtcgatacgccgtatccaactgatatggtgattgccaaacaagtggcacaacaattaagttaaaaaagaatgtggagggtttatgatgaaaaaatcagttgtaatgagtacggtgttagtttcaggattgttattattgagtgcttgcggtcaaaagcaagaagcaaagagctcatcttcatctgaatcaaaagtgacaagtgttaaaaagacaagtcattcaaagaaagcacaaagtcaatcatcagaagaatctgtttcagaatcaacaagtgattctgaagtgacgagccaaagtagtcaaacaccaagtgcaactgattcgacatcaacagtcagtcaatccgcttcaacacaaagtagtcaagcgacaactagtcaaagtagtcaaacgagtcaatcgcaggccactcagagtcaaagtgcgcaacaatcaagcgcacagtcatcagctaatagccaatcatcagcaacgactaaccaaccacaaacaagtcaaccaacaacgactgtggatggcaatcaagcgattcgcttagtcatgcaacaggttggtcaagcacaagcgcatttatcttacttaaataacggcttgatcacacgtaatgcacaacaaggctacttaattaattgctacgcccctaacgaagattcaccacgggcaggctattttgtaacgcaagatggtcaggttgaacaaatttggtaatcgactaataggagttgtgacaggaattattttgtcacaattcctattttttgatggcgttcttttctgaaaaaagattgacaaactggcggactcatgtaaaataattcaagtaaagcgtaactattacgatttaaaaaggagaaagagatgaataaaaaacgattgggcatagtcgctcttttattaatggtcgcaatggtggttgccggttgtggtcagactaaacagactaccaagggtattcaggtggtctcgtcactagatttctacggtgaagctgcgcaagcggtcttaggcaagcacgggcaagtaacatcaattattaacagccctagtttagatccccattcatacgaaccaacaactcaagatgctaagaaggttgcccaagccgatgttgtgattgaaaacggtttgggttacgaccagtggttatccaaggtggcagccagttcggattcagatcagcaaacaatgatcacagttaataaactaatgaaacgaacagatggcgccaatgaacatttatggtatgatttagagaccatgccaacactcactaaacaattaatcacgcgttttagtaagattgatccagcgcataaagctgattttcaaaagaacggtcaagcttacttgaagaaattagcgggtttgaaaacacaattggcagggctcaaggcgcaagctaagggccaaaaagtggcggtcagtgaaccggtcttcgattatgcgttgaaagaaatgggttatcaagttgctaaccaacattttgctaaagccattgaagacggtacggatccatcaccacaagatatcgacgctatgcgtcaactcattaaaaaacatcaaattgcctttttagttgttaacaagcaagaagaaagtcggacgattaaagagatgcaccaattagcaacgaaggaaaaagtcccagttgttcaggtgacagaaacactaccagctaaacaaacctatttaacttggatgcagcagcaatttgatgcagtaggaaaggctcaaaacgtaaaatgacagaattagtaagtgccaaaaatttagggatgaccttcagtaatcgtcaggttctaaaggatcttaattttaaaattgaacgtggtagcatgacgagtttgattggtcctaacggtgttggtaaaacaaccctcgtgcgaatcttaatcggcagtttgcaaccaaccgctggtgagttgacctttttaccggataagcaaagtttaaatattggctatgtgccgcaatttcggaatttagaagcggaatatccgctctctattcggagctttgtcagtcttaaccaattaaccaagcatctgccttggcatacgaagtcagagcgccaagcgttagacaagattttggcccagacgcatttgacggcccttcaaaaaacaacggtcggcaatgcttctggtggcgaaaagcaaaaagcgtacctcgcgcaagctttaatcagtgaaccggatctcttgattttagatgaatcaacggccagtttggatattgagactaaagaagaagtgatggcactagtggcagagctaaatcgtctgcacggcttaaccgtgatttttgtcactcatgatttggatttagcgcgtaagtatacggatcaatatttattcttgaagcgcggtcaatacgaaatggggccaatgagtcaattagaccctaacttagaattagattaaagcggaggacggttgagtgttaacttttgattttatgcggcatgcgtttgtcgccagtacgtttattgcaattacatgtggtttaatcggggtctttgttgtcgctagaaatatgtcgtttttagcgcatacgcttgccgagattggctttgccggtgcttcatttggtgtcttcttaggcatcgcaccgctaaacgggatgttattgtttacgatgattagttcgattacaattggccagatgagtgccaaggaatcaagacgggaagcatcgattagtgcgatttcaagtttgtttgtcggtctaggcattttattcttgtcgttatctaaccgcaatgcgagttacgcaacaaatatcttatttggttcaattatcgggatcagtttaacggatgtttatcagttaattacgttatcagcagttattgtagtcggcatcttacttttctaccggtacttggtctttgattcatatgattcaattggcgcccaagcacaaggcttgaagaccaattggttatcgatttatttcttaattctcttggcaattagtgttagtattgcggcccaaattgtgggttcattactagtctttatcttagtgactttaccagcgttcattgcgaaatatctcgctaagagtgtgccggcaatgttggcagtttctgttggagctgctttgttaggcgtttggttaggtttatggctagggtatattaccaactggccagtaactttcttcatcgcaacgctagaatttatcttttactttattgcacttttatatcatcaacatgttagtcattaaaaaaagtctggccactggccagactttttttatagttacatatcagcaagtaatgcttctaattgatcgaggcgttgttcaaaaacatcaaaggcgcgttcaagataatcggcgttcgtcatatccacaccggctttttgcatcgtttcaattgggtaactggcactcccgtttttgaggtaggtcagatagttgtcgagtgcacccggttggttcgtactgatttgatcagcgagggttgtcgcagcggcaaaaccagttgcatattgataaacgtaatagttcatgtaaaaatggggaatccgagcccattctaaggcaatttgaggatccttggcaacggcatcaccatagtagcgggcgtttaagtcagcgtagtaagttgacatgaaatcagccgttagaggggttccgttggctgctgcatcgtgaatataatgttcgaattcggcaaattgtgtttggcggaagacggtccctttgaaaccatcaaggtagtagttcaacaagtaggcttgaactttgggatccttttgggtcttcaaaagatattcagtaaggagattttcattcgttgtggacgcaatttcagcgatgaagattggataatcgccataaacgtaaggttgattgtgacgtgttaaataactgtggacactgtggccggtttcgtggaccagtgtgtataagttgttaagatcgtcttgccaattcaagagaatgaacggattagtgtcatatgcgccgccagagtaagcgccactgcgcttgcctttgttttcaacgacatcaatttgtcgttgatcgaagatttggtccacaattggggtgtattcaggccctaagacggctaatgcttcgcgcgctgttgcttgcgcttgtggataagtgtagctcaaagcgggtttgcctaaaagtggtgtgtataagtcatacatatgcaattgcggtaatgctaattgcttttggcgtaatttaacataacgatgcaataatggcagatgttggttcacttggtcgactaaggttgtgtagactgattcgggaatggccttaggcgcgagggctgcttggcgcgcactgtcgtagtgatggacttgagcgaggtagttgtgccctttgatttcagtcgcaagggttgtcgcaaacgtatttttgaattgatcgtaagtactatagagcgcttcgaagacgtcttggcggacctggcgatcggttgattgtaacaattggctatagaggccgtttgataattgatgcgtttggccggtttcatcgacaacgtctgggaattgaatatctgagttatccaaaacactaaaggtttgactagcagcaccaaagatatcgccagcagcggcaattagggcttcttcttgacctgataagacatgctcgcggctatcagtgatagtctggataaaatgttgataacttttaagtgctggctcattggtctgccagtcagttaattggtcaacgggaatttcgaggatagcgggttctaaaaaggcggccgccgctgaaacgtcagctgctaaagcatcgacctgagcttgataaccttgataagtggtattagttgtatcctgatcgtttttcatgctagcgtaaacgtagaccgtttctaattgtctaaagagcgttagcacttgttcaatcgttattacgagttgatcagccgttttaaacggttggttatattgttcaagtgctggtagtgcttgtttcaatgccgcaacagctgcctcaaaatctgagtcatttttgaaaatggtactgagatcccaggttgagttttcagggacttcggatcgtgtgggtaatttgtgaattgccataataaacctccgtaaaatatgaataattaaacatattctagcatagttcagagataattcagccacgaaacctttcaaaataaatattaaaattgtataacttttcttaaaaacgattgtttgctttgataattcggctataatgacaacatacataacattcgcgctagtacaacatagaagggaaccacttatgcagaattctaacttttttggctcaagagaagataaatacaaaaaaggcaaacgccatcgaaaattaaaaatattcctattaatcatcgtgattctcgtcttttcaggtggcgcgtatgcgatgcgggtcagtagccaattgaagtctgcagctgataaaatcaataaatcggaagccacttctaaagcgattaaaaataaaaaggccttttcaatcttattactaggtgttgataccggtgctgaagggcgaattgacaaaggtaattcagatacaatgattgttgcaaccgtcaatcctaaaaaagaacaagttaagttagtcagcattccgcgggatactttagcggaattacaaggcacgaagtcttttgatatgcaaaaaattaacgcagcctataatgttggcggctctaaaatggctaaaaaaactgttgagaagatgtttgatgtccctatcgactattacgtaacgattaacatgggggccttatcgaaaatcgttgatgctgttggtggtgttgatgttaacgtcccattctcgttcaaatataatacgacctttaaaaagggtaagatgcatctaaccgggaaagaagcgttagattattcacggatgcgctatgatgataaagatggggactatggccgtcaaaaacggcaacgccaagtcattacgtcgttgattaaatcagcagtttccttcaagtccctcaccaattatgaatcaatcttgaagacgctagaagatagcgtcgcaacggatctaagttttgatgacatggtggccattcaatctgattaccggacagcggcgaaatcaattacttctgattacctcaaggggcgtaatgcaacaatcgatggctcatcataccaagtgccaacaaccagtgaaattcaacgcgtgtcagatgttttacggacgtcacttgggttagagaaaacgaatattgataatgcggaaacaaaacaaaatgcattaaacacgaactttgcggcaacggaatatcaagatgaatttacgatttatccagaaagtgtcctaaaagatggcacgacaacaagtgaagcagccagcacgacaacgactgaagataataccactcaatattcccaaagtgcaccacagtcaaactggcaacagccccaacaggagcagtctcagtggcaaagtagttactaagatggtttgataaaataacagtcaaaaacagcgtcatcaagtttacttgatgacgctgtttttgttataaccagtttacttttagtgccgataacggtattatttgtaatggtacaaaaagacaaacaaaggatgtggcggaacgtgtatttgcttgtaaatgtgatagggttattagtttttattggagtcggctttcttttttcaaagaaaaagaaggatatcgattggcgctcagttttaattatgttagtgattaaccttgtattagcttggttcttaacaagtttttcagttggtcgggacatcgttttaggtgctgccaacgggtttaattggctcgttcaagttgcttacacggggattgcattcgcattaccaagttgggtaaatgttaaacagatggatttcgtagccagtgtgttactccccatcctaatgattattccattatttgatatcttaacttatatcggtgtcttaccatggattatcaaatggttaggccgtgggttagctaaaatcacgggacaacctaagttcgaatcatttttcgcagttgaaatgatgtttttagggaatacagaagcattagctgtttcaagcttacaattgaaacaaatgaaggcagaacggacattgacgcttgcgatgatgtcaatgagttgtgtgacggcttcaattatcggggcttacacacaaatgatgccaggacaatttatcttaaccgctattccggtcaatattattaacgctattattgtgaccaacattttaaatccggttaaagtgacaccagaagaagacacaatcgccaaaatgggtggtagtggttcagcagttggcgaagaagaagctgctgacggtaagattgaacgcgaaccattcttctcattcttaggtgattcaattttaaatgccggtaaattagttttaatcatcacagctaacgtcatcgcctttgttgctttggcagcgttgattgataaagtattacaattatttaacccttggattacccttgaacatcttctaggaatcgtgatgttcccatttgcctggttgatgggcttagatgtcagccacgcctttgaatttgcacaatatatgggcacgaagttagtaacgaacgaattcgttgtcatgggtaaagttcaaaattcaatcacaacttttgcaccacattatcaagcagttttaaccgtttttgtcacatcatttgccaacttctcaacagtcggcatgatcatcggcgccttcaagggcttagttgatcgtgaaaagaatgatatgattgctaaaaacgtcggctacatgctcttatctgggattttagtctcattactctctgccgcaacggttggtttattcgtttggtagaaaaaaataacaaaaaaactggatttggtagtgacaaattcagcataaaatagtattatagtagggtgctattgcgaagttgcaataacatcatactttattgggctatggccaagcggtaaggcaacaggttttgatcctgtcatgcgctggttcgaatccagctagcccaactcaataatcgttgaagaagtgttaagtagataactatttaacactttttttgtacgctaaaaaagtagacgcccggacagaatcctgtataatgaggcaggaactaaaaaggacttaaaaggagtttggcatggctgatttagtttatcaaacaattattgcagatttaaaaaaggcaattaatgcgggtgcttatcccagcatgaaattacccgacgaaagaacgttgacggaacattatcaggttagtcgtagttcggtgaagcgggcgttaaacgttatggctaatcaaggtatcatttttaagaaacgcggttcaggcacctttattaatcctttatatttaaagagtggttcattttttaattacagcggctctaatctaggggttaccgatagctttaaggctggcgatcgaaaaccgggaattaagttattagatttccaagtcatcaagcccagtgcagaattgcaacgggacttatttttggaaccagatgattttgtatacgaaatcaagcgactccggttgtttgatgacgaaccgttcatgattgaaaccgggtttatccccattaagattatgccgggactgaccgaaaaaattatttccggttcaatttttaattatttagaaacggaaaaaaatcaagaagtgacgcgcgccttcttatcaatttttgcagaaccttctacgcaagatgatcaagatcagctgcaactaaagccaactgaacccgtgggcatcatggaaggcatcttctttttggatgatgggacaccatttgaattttcaacaatgcgacttcattatcagtacatgaaatacaatacttttgtttcagtcagcggtcgggaatagaccgttatttttatcttcttaaaattggtacgacccaatataataaatggttgacttttagtttttatctagtatgataagtatgtaagcagaaacataaaagttgcaaatcacgcaacttattcataaagtgaacctatcagaagcttttttaaaaaaaggagtgctattacgatgacagattattcaagtaaagaataccttgctaaagttgatgcattttggcgagcagctaactatatctcagtaggccaattatatttaaaagacaatccattattacaacgtcccttagaagcaaaagacgttaaagttaaaccaatcggacactggggcacaatctcaggacaaaacttcttatacgcacatttgaaccgtgccattaacaagtacgacttgaacatgttctacgttgaaggcccaggtcatggtggccaagtcatggtttcaaattcatacttagacggtagttatacagaaatctacccagaaatttctcaagatgttgatgggatgaagaaattattcaaacaattctcattcccaggcggcgttgcttctcatgctgctcctgaaacacctggttcaatccacgaaggtggcgaacttggttattcattatcacacggtgttggtgcaattttagacaacccagacgtcatcgcagctgttgttgttggtgatggggaagctgaaactggcccattggcagcatcatggttatcaagcacatttatcaatcctaaaaatgatggtgctgtcttaccaatcttgaacttaaatggtttcaagatttctaacccaacaatcctttcacgtaagagtgacgaagaattaacaaaatacttcgaaggtaacggttgggcaccaatctttgttgaaggcgacgatcctgaaaaaatgcacccagcaactgctgctgcaatggatgaagccatcgaaaaaatccaagcgattcaaaaagctgctcgcgaaaacggcgatacatcacgtccagtatggccaatgatcgtcttccgcgctcctaaaggctggactggtcctaagacatgggatggcgtaccaatcgaaaattcattccgtgcacatcaaattccagtgccaattgatagcactgacatgcaacatgccgatgcattagttgattggatgaagtcatatcgtccagaagaattatttacagctgaaggtcaattaaaacctgaaatcgctgcaatggcacctaagggcgacaaacgaatggctgctaacccaattacaaatggtgggattgatcctaaaccacttcgcttgccagattaccgtgactacgctgtggataacacagaacatggtaaagttgttgcgcaagacatgattgttttaggtgaatatgtccgcgatattattaaagacaatgatcaaaacaaaaacttcagaatctttggccctgacgaaacaatgtcaaaccgtttgaaccacatctttgatgtgacaaaccgtcaatggatggaaccaatcaaagaaccaaatgatcaattcatggcaacagaaggccgtgtccttgattcacaattatcagaacatcaagctgaaggctggttagaaggctatgtcttaacaggtcgtcacggcttcttcgcaagttacgaatcattcttgcgcgttgtggattcaatgttaacacaacacttcaagtggttaagaaaagcagacgaacaagcatggcgtaacaagtatccttcattgaacgtgattgcaacctcaactgttttccaacaagatcacaatggttacactcaccaagatccaggtgtcttaacgcacttagctgaaaagaaacctgaattcatccgtgaatacttaccagctgatgccaacacattattggcaacaatgaatactgtcttccaaagccaagaaaagattaacttagtgattgcttcaaaacacccacgtcaacaatggttctcaattgatgaagcaactgtcttagttaaaaacggcttgaagattattgattgggcaagtacagatcaagatgctgaaccagacgttgtgattgcagctgctgggacagaaccaacacttgaaagtttggctgctatctcaatcttgcacaaacaataccctgacatgaagattcgtttcattaacgttgttgatctattgaaacttcgttcacctaaagtggatcctcgtggcttaacagatgaagaattcgatatgtactttacaaaagacaaaccagttgtcttcgctttccatggtttcgaaggcttagtgcgtgacatcttcttcgatcgtcacaaccataacctccatgttcatggctatcgtgaaaatggtgatattacaacaccattcgacatgcgtgtcttgaatcaaatggatcgttacaacttatctaaagaagtcgcaattgacgtgcttggtgaccaagctggccaattcgcacaatcaatggatgatatggttgctaaacacaaccaatacattcgtgatgaaggtactgatttacctgaagttgaagaatggcaatggacaccactccgttaacagagtgaaagtgcgtttgaaccggttatcttctgagcattaactggatttgacgaattgacgatgtaatcgtcgattcggtaaatttggttaagcgcaggaagatggttcaaaaagcacgtttaaactatagaattctgctatcagaagaagggtctgagacaaatcaattttgtcccagactctttttttatggattcctagtgactgagcctttatttttagggttaataacggtaaactagaagacaagtataattttagaaagaggcgtttttatttatggcaaagaacaaaatccgtgtacgatatgcaccaagtccaactgggcatttgcacattgggaatgctagaaccgcattatttaattacttatttgcacgtcacaataagggaactttcgttatccggatcgaagatacagatacgaaaagaaacattgcagacggtgaaaacagtcagttagataacttaaaatggttaggcatggattgggatgaaggtccagacaaacctggtaactatggtccttaccgccaatcagaacgtcgcgaaatctatacaccccttattcaagaattagttgaaaagggtcttgcttacgaatcatataaaacagaagatgaattaacggcagaacgtgaagcacaaaaagctgctggtgaagcacctcgttacgtttacgaatatgaaggtatgagcgatgatgaaattaaggccagccaagaagctgctagagcaaaatgcttgcaaccagttgttcgtcttcgtttacctaaggatcatgtttataagtttgatgacatcgttaaaggtgaaatcagctttgaatcagatcgtttaggtggcgactttgtcatcatgaaacgtgacggcatgccaacttataactttgccgttgtcgttgatgatcatttgatggaaatcacacacgttttacgtggggacgatcatatcgccaacacaccaaaacaattggccgtttacgaagcctttggctgggaaccaccaatttttggtcacatgacattaatcatcaatactgaaacaggtaagaaactaagtaaacgtgatgaatctgtgcttcaatttatcgaacaatatcgcgaattgggttacctaccagaagcgatgtttaactttattgctttattaggttggtcaccagttggcgaaagcgaattgtttaaccgtcaagaattcatcaaacaatttgatccaaaacgtttgagcaaatcgcctgctagtttcgatcaaaagaaactcgaatgggtaaataaccaatacgttaaacaatcagatcctaacaagatcatggatctttcattggacagcttgattaaagcgggtaaaatcgccgaaaatcctgatagcaagactatcgaatgggcgcgtcatttgatcgcgttataccaagatcaaatgagttacacagctcaaatcgttgaaatgtcagatgtcttcttcgaagaacctgaacaattagatgcagaagcgcttgaagaattaaataacgaaacagcaccggttgttttgaaggaattcagcgaacgcttgaaagatttgacattattcacagcaccacggattatgcaaattatcaaaggcatccaaaaagatacgaagatcaaaggtcgtctattgtacatgccaattcggattgcaacgacgcgcgaaatgcatggcccatcattaccagattcaatcgaattactaggtaaagatcgtgtcttagcacatcttgaaaaaacattagccgaaattaaataaagaaaaagtgtcacggataattaatctgtgacactttttttgtatcagatattaagattttacaagcacttggtgtaaccccttacatttagctgtatactagaaataaaatagcgtcagtagggggatttaggatgaaagttttaacttttggtgaaatgttaatgcgtttgaagacgccggggaatcaacgtttattacaagcggatagttttgaagcctcatatggtggtgcagaagcgaacgtcgctgtttcgttggcacttttaggggatcaggtcgcttatttaacgaagttgccggagaatctattagggcaaaagggtatgcaaactttgcggggatacggtgttgatacgactaagattcaatacggtgatggccgcttgggtttatatttctttgaaaaaggtgccagtgttcgttcaactaatgttgtttatgatcgggcacatagtagttttgcgacaatgaccgctagtgaattcgattgggcaacgatttttgaagatattgattatttctatttctcagggattacacccgccatttcggctgaattggcgcaagcagccgagacagcttgccaatattgtcaagctcacgatattccagtagtttgtgatttaaactaccgcgggaagttatggtcaccagaacaggcgcaagcaacgattaaacgcttaatgccgtatgtcacgatctgtattgctcatgatgaagactttgaagcaacactcggaattcaagcctttgatggggatgagagtcacggtatcgcgcaaaaagaatcttttaaagcagcgatgcaacaagtccggcagattttccctaactgccaaatggttgccagcatcttacggaatattcggtccgttgaagatagcgagtggctagcattgttattaaaggatgaccaattctttgaaacgggcacttatcaaatgcacgttatggaaggggtcgctgccggagatgcctttggcgcgggcttaatgcacgggttattaaataactttacgcctgatgagatgttgcaattcggcttagcagctagtgtggccaaattgacgattgctggcgactttaatttaattggtgaagcagaaattgaagcaatcgcacaaagtggcggcggtgcccgcttatcacgataaataatggttagcgctatcaatgtaaccgttttaattgtataattaacttatacaattaggaggtactgattatgacaaaaaaagtagcgtttattacaggtgcagcacaaggaattggtaaagccatcgcgcaccgtctttcaaatgacggttttgcagttgccatcgctgatttcaatttagaaggtgcccaagcagttgcagctgaaattaacgaaacgggccgggctatcgcagttaaggttgacgtttctgatcgtgatcaagtatttgcagcagttgaaacaacggttgctgaactgggtgggttagatgttgttgtgaataacgcaggtgtcggcccaacaaccccaatcgaaaccattacaccaaaacaatttgaaaaagtatatgcgattaatgttggtagtgtttactggggcattcaagcagccgttaaagccttcagagaccttggtcatggtggcaaaatcatcaatgcttcatcacaagctgggcaagtcggtaatccagaacttgctttatatggtggcactaaatttgcgattcgggggattacacaaactgcagcccgtgatttagctgatcaagggattacggttaatgcttattgtccagggatcgttaaaacaccaatgatgatggatatcgcacataaagttggtcaaaatgcgggcaaagatgatgaatggggcatgcaacaatttgccaaagacatcactttaggtcgcttatcagaaccagaagatgtggcagcctgtgttgcttatttggctggaccagattctaattatatgactggtcaagctttaattatcgatggcggcatggttttcaattaaaaatattaaaaagggcacgtactgcactaggccctgtcaagttgacaaatgaaataatataaagttgaatctgtctctatgcggcttcactccagtattcatctggggtgaggccgtttctttgtgctgagcggttgtggtgattgaaatattcgattccttcctcaaccagtcttacaagctcttcgcaagtctttgctagtggatggcgagccatccaccgtaacttgaattcgttccaccagcgctccatcggtgcgttgtcgtatggtgttcctggtcgagacatgctacgtgtgacgttgtaacgaccaagaaagttgttgaaggcaccagaggtgtaggctgatcctcgatcagtgtgaaccaatgggtggacgtcgccagaagcctcaaaggctcgttggaaaacctcgatttctgctgctgacgtttcagtagtgctcaaattgtaggacaacaaacgtcggccgtagagatcaaggacgccactcaagcgcaccttatacttattatttacgccgtaagtcagttccgttgaatcggacaaccagacctgattaggactgtcgacgtcgaagttctgattgagcacattgtcttgaatgtgctgttcgttctccttatgtcgactgtgcttcttgacccgaatttgacatgtcaagctgagctcccgcatcacacgacgtaccatcctgaaagtaacggggaagtcaattaggtcatcatgttgaagattcaataaaaggttcccagcaccgataccttgatgatgaaaatcaaaccagtattgtgtccgttccttgagctgacgattacgggcttcccaagctgtttcttctcgatttaaccctttgtagtaagcctgccggcttacaccgacaacggccaacagcgtagatattgcaccacgcttgccttgactgacctcattaattgcgaagtaagacagtcgatgttgtttactcaccccctgcgctggatttccagcaatttttttgcgaatgcctccacaagctctttgtctgcgagctgtgctttgagctgcctgatttcaagattggctttatcgagttcagtcagctcagcttgttctttgtgatggccacggttgtccacgagcgcctcatagccgccgtgattggccttgatcacccatgaacgtgcttgttgataagagacttggaagcgttcagcggcctctgtgtatgaatgattcagcttggtgacatactcgacaatttcaatgcgttcttccaaggttgttttacggctcatagtgggaacctgctttctggacggcgacgccgtcaaaggtttattcccattatacttgtttacccagtctacgacttgctgcgatccacgaagtccaaacttatttgcaagttcatcaaaggtgccttcgcctataagatatgcgtggactactttgagcttgagttccttcgaatagtgtttgtttttcttagcctcctttagaccattaattccatcacgggagtatcgatctcgccaacgctctagcgtcttacgatcaatgccatggcgattggccaccggacccagtccaatttttgattgggtcagttcatctaagattgttaatttctcgagtaccgtatgtttagatctgggcatacaaaaatccctccatagtcgtcagatgaattattgtatttcatctgacaaccataaagggattatcgcatacaagctaacttgtacgtgccctttttaggttagagttgaatgatttttaaaagtgcagccgatacttcttcacgcttatcttcagggagttgcgttaggtaatgcaccaactttaaggtttgagcacctgatagtgctggatcgccaaaaaagtcaattagctcaatccccaatgcttcggcaatatcgttgagtttcttaatttttaagttatcaacttcaccgcgttcaatccgagaaataaagctgtaagaactgccagatttctcggccagttcttcaatggttagccctagctgcttacggtgttcgcgaatcatctgactaattgtatctagcattcggtaagctcctatcatgattatctaactttaacgatagaggtttctttaaattgttaaaagagcttaaaagctatctttttgtaaaaaaagtagcaataatgattcgttaacggtataatacaactattaattatcagattttaagcaggggactgtcaattttaagaactggtggttaaaaatgatattgggggatattaatgatgaaaaagagttacagtcttatcttaacggttgcggtggttagcttattgggcgcttgttcagctaagggtgaacaaacaaccaaatcaactagtactagtaccagccattctaaaaaagtgacatcagtaaccagcagtcaaaagcaagtccgtaaagaaacgacttcgagtgtgtcgcggacaaaacagcaagcacaatcacagtcgcagaccaaacaagcaaaggcattgtgggatagtaacaagaaacaagacttggcgacttttatgagtagttggggaacgacgatgggccaaacgtatcaatcttacgatttaacacgggatactgattatgctggtattcattttcctagtaagttagcccagaccgatttagcggtcgacgatacgccagtgacggcggcttggagtactgatggtaccggtagtgcggactataacgttgttgcaatctattgcgatgtcgatggcgggacagttgggggtcacttatacttatttacgttccataatgggcaaccagtggtcttgattacctctcaaaatcgggggacaccagataaccggctccatttcagcgtcactgctaatacggatttgaagacgggctttgccaatattgttagtgggcagggcagtggacaggcaaatacgagtcaaccgacgactagtgcggtgagtcctatttcggcagccgaagcacaggcgattttagcaaaacaaaatattgaataccacgttggtcaaccggaaccacaaggaaataatgcgagcttaccaggtggtggtattatacttaaacagtattacggtgcacaaggaataaagatttttaaactaacgcctaaaccaggaaacaaggtcaatattacggttcaagaaggtactattaaggatggtcagggtggtttagcagcacccatttcccaaaatattacggttgatcgctaaaaaagaagaggtaccgacaatttttttgtcggtacctctttttgatagttcttgttttattgtcgggtccgatcgatttcggctctgatttccttaaagctttgttctgtttcttgaccattattgacggccaccatcatgaagaggctatcgataagactgatttgggcgattaaagcatgcagcgcttcggcccgataattagtttcttctgaaattgaaagtagggtgatatcgccgagcttggcaagacttgaattaccgaaactggtgatgacaatcagtgggacttggcgctcttttagaatgcgggcgagttctaaagcgtccttattttgaccactgtgtgaaatgataatcgcgcaatcttgatcggttagtttagtggcttgcatgagttgtagatgataatcttggttgaagacggtggggatgctggttctgaggaatttgtggtaaccatcttgggccacaatcccggaagcccccaaaccaaataaactaagcagatgggcgcggtttattaaggcgaccgctttttgaagttgttcttcagttaatagcgaccaagtagcttttagtgcgttgctgttagaactgaagattttttcggccatcgttgtaaaagtatcgtttgcattgatttcatgaaaaagtggcgaggtgttggcttctttggccaggagtgccatcttgaaggcttgaaaattatcgaagcccaatattttagcgaaacgtgaaattgtcgcggtggagaccccacagttggcggcaaattcttgaatcgttaaacgctgattgaattgtgcttcttggaagatgtagtcagcgatttgcttatatttttcgctaaaattatcataataagatcgtaataatgaatcgattgcttgcgccattgtcgggcccccctagtaatgattagccctagtatagcataaaaataaaaatacgaaaataattttctctaaaacgcttgcattgtgaaaaaaatttacatataatgagtttgtaagataaaaggataagcagataggggacttaaaaatgaaattagcaatggtcggtttaggcaaaatgggtatcaacttagtagccaacttacgacggaacggtcacgaagttgtggcttttgatttaaatcaagcagcggttgaagaagccgttaacttaggtgccacagcggcaacggatttagacgatgttttagcacaattaacgagtcctcgaattgtgtgggtcatgttaccagctggtaaaccaacagatgccacgattcaaacattaagtgaaaaaatgaatgccggagatatggtgattgacggtggtaattcattctttgaagattcagaacgccataatgcacttttaaaagaacaagggattcatttctttgacgccggtacttcaggcgggatgagtggtgccaatgctaatgggaactttatgatcggtggcgatagccctgaagccttcaagacaatcgaacccatctttaaatcaatcgcccaagaagatggctacctgtacacaggtaaagctgggagtggtcattacttgaagatggtccataatgggattgaatacgggatgatgcaatcaatcgcagaaggttttgatgtcttagaacatggccgtttcgaatatgacaacgaagcagttgccaaggtttggagcaacggttcagtcattcgcggttggctaatggaattagcacaatcagccttttctaaagatccagaattagaatctttaaaaggcattatgcattcttcaggtgaaggtcaatggacattggatgaagccttgaaattacaagtaccaacgccagtaattgggttatcattgatgatgcgttatcgctcacttgaagatgatacctttacaggcaaagttgttgccgctttaagaaacgaatttggtggccacgctgtcgataagaaataattcggttttaaacaacaaacaaacgaggtaattaatgatgaaatatatgattggtgccgatattggaacaacaagtacgaaagctgtcctatatgatctaaaagggaatgtgaaggcctatgctaacgttggctatccactataccaaaatgtacctgatatggcggaagaagatccagatgaaatcttcgaagctgttgtggaagtactgggaaaagtaatgcgcaaaggacatgtacaagctggcgaattacaaggtgttagtttctcagctgcaatgcatagtttaattttgatggatcgtaaccatcaaccgttgacaccggcgattacttgggcggataaccgcgctgctaaatatagtaacgaattaaaggccaatggattagggcacgagatttatcaacataccggaacgcctatccacccgatggcaccattatcaaaaatcatttggttgcgtcatgaacaaccagacctcttcaaacaagcagcacaattcattgatattaaaacatatgttttccaaaaattattccatacttacaagatggaatattcaatcgcttcagcaactggcttgttcaatatcttcaatttagattgggatcaacaagctcttgaagtagccgggattacccgcgaccaattaccagaattagttgaaccaactgcacaaattacaggtttagatacaacttacagtcaagaaacgggtatcagtagtgatgtcccatttatctttggtgcgagtgatggcgttctatctaacttaggggttaatgcaatcgatcctggcgttttggcagtgacaattgggacgagtggtgcagttcgagtggtggttgataaaccagtcgttgatccaaatggtcgattattctgttacgctttaaccaaggacaagtgggttgtcggtggacctgttaacaacggtggaatcgtcttccgttgggttcgtgaccaactctttgcacctgaaaaattaacggctgaacagatgcaagtatcaacctatgatcttttgacgcaaattgctgaaaagattccagccggttcagacgggttgttattccacccatacttgggcggcgaacgagcaccaatttgggattctgatgcacgtggttcattctttggcttaacacgtcaacatacacgggcccacatggtacgtgcagcactagaagggattgtttacaatctctacatggtgatgttaatgatcgaaggcgttgctggtaaacctaagagtattcaagcaaccggtggttttgcccgttcagaattatggcgtcaaatgttagctgatatcttcgaacaagatgtgacgattccagaaagttttgaaagttcatgtttaggcgccgcagttttagggatgtattcattaggtttagtggatgatctctcagctgttaaagacatgattggtgtgacaaatgttcacgaaccaaaagcagaaaacttcgatgtttaccgcgaactaattccaatttggattcgcctcactcgggaattgagtccagaatacagtgcaattgctgatttccaacgcagacatatgcaagttaaagaagcaactaaggattaaagattaaacgttcaatcaccaaaagtgggattgagcgtttaatttgttaatttaatgtaaacgcaaacaaaatagaaagtgggaatggttatggaactcttagtcttattattaggcatcatgttattattactactcattattaagttcaaactgaacacgtttgtttcgttagtgttaacagcaatggttgtgggtgtcggtttagggatgccactgactaaaattgcaactagtgttcaaaatgggattggcggacaattaggtgaattatcaatcgtctttgggtttggtgccatgatgggccggctcgtcgctgatgctggtggggcgtttagaatcgcccacacattaattgataaatttggtaagaaacgactccaaatcgcgattatgttggcgtcatttattatcgggattgccttattcttcgaagttgggatggtcctattagtcccaatcgtctttgcgattgccgttgaagcgagcgtaccgattttatacttggggattccaatggctgccgctttatctgtgactcatggtttcttaccaccacatccagcaccaactgcgattacatctgctttaggtgctaatgcgggacatgttttattgtacggtgtcattattgcgattccatctgtgattattgcaggcccactttttacaaaagtggcgcggaaaatgattccagacgcctttgcacgtcaagggaacttgacggcacttggtcctcagaaaacgtttaaattagaagaaacacctagtttcggtattagtgttgtgacctcattattcccagtaatcttaatggcgatcacaacggtttaccaaatgttattcaacggtggttcactaccaaagaacccaaccttattagattcaatcattggttttatcggcacaccagcgattgcaatgaccatttcattgctattagcgatgtacacaatgggctggggtcgtcgtattaagacaccagcaatcatgaaaacaattgaagaagcggttaaatcaatcgctatgttactcttagtaattggtgggggcggggccttcaaacaaatcttaatcgatggcggtgttggcgatagcgtgacaacattattcgcgcatgcgagcttatcaccacttgtcttaggttggttaatcgccgttgtcttgcggatcgcgcttggctcagcaaccgttgcttcattaacagcagccggtttagtattaccattgatgcaatcagcaggcgtgaaccctgctttgatggtgctttcaatcggtgctggtagtttagcagcatcacacgttaatgatgctggtttctggatgtttaaggaatacttcgacttaagcgttaaggaaacattggcaacgtggaccgtcttagaaacattaatttcaattgtcggtttagttggcgtcttactattgagtttagttgtctaaaaaagttattattcaaaagagttgcggcaaaattcattttagcccagctcttttttttacgattaagcggtagcgcttgcaacgagtggcacgctcccctatagttaaggagaagtaaactcaggagggttattgtatgattgaaaaaagagtactctcagcaactgatgaaccagcattttacgacctcgcccaatacgcctttaataaacaggatagtgagaaacagcggttattcttccaaaaactgtatcagaacagtgtcggttttggcgtttttgatcaaggtcatttgaagagtagtttattagcaacgccgtttgatgttaatttcaaagggcaaacatttaagatgagtggtattggttatgttgccagttacccagaattttcaggccaaggtggcatctctgatttaatgcacttagcctttgaacggatgcaagcagatggggttacactatcttatttagcacctttttcgtatcctttttatcgtcgttttggttatgaacaagctttcgagcaaacctgttatcagattgaaacggcggacttgccacgtcttaaatttgcgccagatcaggggtacgttgaacggttatcgttaagcgcagccgtgccgttgatcagtgccttccaacagcaacgtccgcataaccaggtcggcggtatccaacgggccgcgtggtggtggcagtataattgtttgaagcatactgattgggaagtagccgtttatactgacggcgaccaacaagtagcaggctatgcgatttatagccgtcaggcgacaactctagagattcaagagttattgacatcaacggttgccagtcaggaacaacttgttaagtttattttcaaacaccaatcggcctatcaaaccattcgctatgagagtggtttaacaactaacttgggtgatttattaccggatccgacaattgttgaaacaacaacggtaccttatatgatggcgcggattgtgtcgttggctgatttcttagcacgttatccgtatgaagcagcggaccttgaggcagtgaagattgctgttagtgatgactttttacccgagaatagtggcgtttggcaattaagtttacacgcgggccaaccgacggtaacaaaattggcgagccaaacggcggatatcacagtaaccattcagtagctcaccaaggcaatgatgggttaccgcacactggcatcgcaagcgcattacggtcaggtcagtggtgatgcggctaaaatcgctcagttaagcgcggccttcaatcagacgcaaccgatgttgtgggactatttttaacacaaataaaaagagcaccaagactaatgtcttggtgctctttgtgattagattaagaagtagccaaatgttcctaagatgattaagaacaagaagttcataccagtaaagacgactaagaatttaccaatatctttaccccagccttttttgaaacgtttgtaagcaattaagttagcaagtgaggcgaacattgtgccgaccccaccgatgttgatggctaagaacattgcgtgactgtggttggtgaagcttgatagtaaaatttcagttggaacattagcgattaattgacaactaatgagacctgtaagataagtttgtttagcagtaccaacaagtgaacgcatgaaagtggcgattgttgggatgtggcttaagttaccaactgcaatgaagaagcagaagaaagttaacaataaaccataatcgactgttttgaaaagcttcggatcaaatactaaaatcgcaatgatgaccaagataggtgttacccataatggaatcaatgagaagactgctaagaaaacaacgattgtgagggggacgaaataccataagggccccttttcaacttcaaccgggtggagaccatgtagtttgatgggttcctttggaaaaagaaacgttgtggcagtcaacataatgatactaacaattaagatcggaattgaatattcaaagaaatggcgaattgtcatgtggtagaacgatacaaggaaaatattgtgcgggctcccaaacggtgtgagggatgaaccgagattagccgaaatcgtaattaacgtgactggtaaaatcggtgaaaaatcaagttgccgcgcaattaggatgaacaacggtacaaaagttaagaccgtcatatcattggttagaaacattgccccaacaaaggtcagtgccaagagcatctgcattaaagcacgtttggaatgactcttaataatcaattcccgtgcgaagtaatcgagcacatgtagtcgttgataaacttggacgagcgtcataatacaaaagacactaacgatcacgtgaaaattaacgtaactaagatggggtcgattgaaaaatgaggtgacaatagctgcaatcgttgcggcgagaagtaatttgtcatctaagaaaaaatctcggatgttcaaagcaatgtttttcatatcgtttaagttatcctctttatattaagattaaaaaagcactattccaattctagactgtttttggcgataaaaacagaaaaatttacaatatatacataatttttacaatagctagaatcccattttactaaaggcggatgactatttaagcaatttttaagtcatttaactgctaaagtgctgcgtaattcagtataatagtaatagaaggaagcggttaatttttgattgcttcttgagcgcaactccgctatattaggattattattgattatttaagaagaaggtggcgcacatgaaagatgccccaagacatacagtcatattaggaatcgtcgctgcagtaatttcaatcatctgtggcatgttaattttgtatagtattttacacgtcggtttgtggctttcgattttagtcagtgtcattatcggtctttatctaggttataacactttttatagtacctatttagccgaaatgattaaaattgaagttatcaatcaaggtttagacagtaatgacttagctgaattgatgaacgggaatgccaaggactatcccattattcgtggtgatttacgtttgattattccacgacgtaaacgcgcggaattattggctaagctacgcgatcgggtaggctaagcggttttgcttccgcattagaactgtgttaacattaacctaacttattgaaaaggtgtcgagaacaatgacaattgaacgaccattaattatgaagctttgctctacacatttgaagatgacacagcgtgtagagcctaatattgattaaaagtcatctatagaagaatgctcacggtaatatgcgactttagggttgcttattttgtggtgtcttttatagatgacgggcgataaagtcagtgattgtaatcgcgacaggggtagctagatgctatccctgttttttattggaaagaaagtaggaaaagacaatgagtattttaaaagtcgaaggactaagtcaacaatttttagacaaacaactttatgatgacgccgggttccaagtcaataaaggcgaacacatggggattaccggtcaaaatggggtcggtaaaagtaccttgattaacattttaacaggcgctattttaccagatgagggtaaagtaacctggcaaaagaacatcaagattggttatttggatcaatacgccaaattagcgccgggtttatccatttttgaattcctaaaaacagcttttgcagatttgtatgctcaggaagaacggatgagtcaatattacgccgactatgcaacgagtttagatgaccaactacttgaaaaagcgggtgcgattcaagagttactagaagccaagaacttctatgaaattgatacgcgggttatgcaagttgcaactggtttggggattgatgcgctggggatggaccatgacgtttcacaacttagtgggggccagcggtcgaagattattttagcgaagttactattagaagaaccggatatgttgttattggatgaaccaaccaattatttggataccaatcatatcgattggctcagtgattatttgaataacttcgaaggggccttcattacaatctcccatgattatgatttcttggaacgggtaacaacctgtattgccgatatcgaatttgggaagattaccaaatataccggaacgctccaacaggccttccgccaaaaagccgataaccaagctagctatatgaaggcttatgagaatcaacaaaagaaaattgaaaagacaaaggcttatatccgtaagtataaagcgggttcacggtcaacaattgccaagagtcgtgaaaagcaattagctcatatggatattttgacacccccaagtaatcgcgtgaaggctaacttccgtttctcataccacgcaacagccagtcagattctattgacgaccaatgatctagagattggttacgaaaatgcgttattgccagccttaaacttctcaattggtcgggatcaaaaagtggtgctcaaagggtttaatgggattggtaagtcgacattgattaaaaccatcattaaagaaattccagcaattagcggtgattttgaaattgctagcacggtgaagtttggttacttcaagcaggacttaaagtggcctaacaacatggcaaccccactccaatatttacagggcgaatatccagaacaaaagcaaaaggaacttcgccaagtattatcccggacaggactaactgctgaagaagcgatgaagccgttgaaacaactcagcggtggcgagcaatcaaaggttaaaattgccgaattgctcctaacctcaagtaacttccttctattagatgaaccaacgaaccatttagacgatgatacgaagaacgcattgcgcaaagccatccaagaatttgagggcggcgtcttgctagtgacccatgaagaggacttttaccaaggcgattggatcgataaagtgttagatgttgagtccttgattaaatcttgatgatttatttttaatatatactgtatctataacagacaagtgttaagcttatggggataaatgactaacttaactaatattggcggaggtcatatggataaaattgatgtaacaaaattaacccagatgtcgaactttgaagtcgcagcgctcttttataaatatgcactgacaaacagtcgtggtttacgggcgattaatgtcgggcgcggcaatccgaattggattaatacacaagcaagatttgcctttaatcggattgttgaatttgggatgaaagaatccttacaaacaattaacttagacgatggtaatcttgctggctacaccgatcaaacaggtatcgcggaacgcttcaatcagttcttagatggtgataatccggtggatgcttttttgaagcaggccttggcttacacccgagacgtcatgcatatcaaccaagatgagctggtctttgaatgggtcgatggcgttattggcaaccattatccagaaccatcacgcagtttagtgaatgttgaaaagattttaaaccggtatctagaagtgaatctctatcgcggtgaacatctatcagataagacgaaggtctttccaactgaaggtgggacagctgcgatggtctatctctttaatgagctaaaggtcagccatattttagaggcgggtgatactattgcgattaatacgccaatctttacaccgtacttgcagattccagaactaaatgaatttaaactacaagagtttaacgttagttctgatgaatctgatgactggcaattggtcgatcataaatttgaagagttgaaggatccaaatgttaaagcctttttcgtggtgaacccaaccaacccaacttctagagcttttagtgaccatgcactagataagttgaaagaagtcgttgaagccaatccgaacctcgtgattattacggatgatgtttatggcacgtttgtcgatgattttaagactatctattcagttgtgccacataatacattgttagtgtactcattctctaaattatatggggcaactggtcaacggattggtttaatcgcgatgcatgacgataatattttcgataagttgattgaagaaatgacagcagaagatcctgttattagagaagctttccgaaaacgatattcgtacgttacaaataaaccgcacgaaatgagttttatcgatcgaacggtagcggatagtcgaaacattgggttataccatgcagccgggttatcaacaccgcaacaaattaccatggcactctttagtttgacgaatctgatttatgaagggcaagaagatccgtatgtgacagcatccaagaaaattgttagctgccgttacaaggctttttgggaatcgttagggttagtcgttaagacaagtgaggaaaatgcagaatactatactgtttttagtatctataaattagcggaatcgaaatattctaaagattttagagcatatctcgaacaaaactgtaatcatcttgaatttgaatggcgcctcgcagcggaatatggggttgttgtaatggatggtgctgggatgggaaccaaggcggggtacttaagaatctcgcttgctaaccgtccagataaggactatgaaacagtcggcggtcggatttctgacttactcgcaagctactatactaaatacttgcaatctaaagcacggtaagttgtaatgaagggcgttagaacaatgataagttgttctaacgccctttttgtgtcccgttcagtagaattttatatagaaggtattagttggatttaatgcttataggaataaattaatcatttaatcaattttttagtaataagtgcttgacctagccgtattaagttggtaagatataaaagttgtcaaaagcgagtcactcagtaatgagtaaggaaataaataattaaaatgtttttgaaaaacacttgttatttatttctaatcgtgataacatgttatatgttgcttacggagctataacttctaagtgataaataatttttagaagtgtttgacagacgattagttatatgatataattaaaatgctgtttcaacacagtagatctttgaaaactgaacaaagttttgataaaccaaatgtgtagggtcgcccttcggggcgcaacatatttgcgaagtcaatttcgctagcaaataaattaagtaacaaaacaagagctacaaacttttaatcgagagtttgatcctggctcaggacgaacgctggcggcgtgcctaatacatgcaagtcgaacgcactctcgtttagattgaaggagcttgctcctgattgataaacatttgagtgagtggcggacgggtgagtaacacgtgggtaacctgccctaaagtgggggataacatttggaaacagatgctaataccgcataaaacctaacaccgcatggtgtagggttgaaagatggtttcggctatcactttaggatggacccgcggtgcattagttagttggtgaggtaaaggctcaccaagaccgtgatgcatagccgacctgagagggtaatcggccacactgggactgagacacggcccagactcctacgggaggcagcagtagggaatcttccacaatggacgaaagtctgatggagcaacgccgcgtgagtgaagaaggttttcggatcgtaaaactctgttgttggagaagaatgtatctgatagtaactgatcaggtagtgacggtatccaaccagaaagccacggctaactacgtgccagcagccgcggtaatacgtaggtggcaagcgttgtccggatttattgggcgtaaagcgagcgcaggcggtttcttaagtctgatgtgaaagccttcggctcaaccgaagaagtgcatcggaaactgggaaacttgagtgcagaagaggacagtggaactccatgtgtagcggtgaaatgcgtagatatatggaagaacaccagtggcgaaggcggctgtctggtctgtaactgacgctgaggctcgaaagcatgggtagcaaacaggattagataccctggtagtccatgccgtaaacgatgagtgctaggtgttggagggtttccgcccttcagtgccgcagctaacgcattaagcactccgcctggggagtacgaccgcaaggttgaaactcaaaggaattgacgggggcccgcacaagcggtggagcatgtggtttaattcgaagcaacgcgaagaaccttaccaggtcttgacatcctttgaccactctagagatagagctttcccttcggggacaaagtgacaggtggtgcatggttgtcgtcagctcgtgtcgtgagatgttgggttaagtcccgcaacgagcgcaacccttattactagttgccagcatttagttgggcactctagtgagactgccggtgacaaaccggaggaaggtggggacgacgtcaaatcatcatgccccttatgacctgggctacacacgtgctacaatggatggtacaacgagttgcgagaccgcgaggtttagctaatctcttaaaaccattctcagttcggattgtaggctgcaactcgcctacatgaagccggaatcgctagtaatcgcggatcagcatgccgcggtgaatacgttcccgggccttgtacacaccgcccgtcacaccatgagagtttgtaacacccaaagccggtgaggtaacccttcggggagccagccgtctaaggtgggacagatgattagggtgaagtcgtaacaaggtagccgtaggagaacctgcggctggatcacctcctttctaaggaataatacggaaaaccttgtacatttgcgaaatcaaaactttgtttagttttgagaggtctactctcaaactttgttctttgaaaactggataataagtaatatattagttttaaaagccgagaaaaacattgcgttttaaagagttttttaataatagaaatatgaattagttcatatcgctaaactcaaataataaccctttaccgtaggtaaagataggttaagttataaagggcgcatggtggatgccttggcactaggagccgatgaaggacggtactaacaccgatatgcttcggggagctgtaagtaagctttgatccggagatttccgaatgggggaacccaatacttttaatcgagtattatcattaagtgaatacatagcttaatgaaggtagacgaggggaactgaaacatctaagtaccttcaggaagagaaagaaaaatcgattccctaagtagcggcgagcgaacggggaagagcccaaaccaagaagcttgcttcttggggttgtaggacagaactttggagttaccaagttaagttgtaatcgaatcagctgggaagctgagtcaaagagtgtgataaccacgtagattaaacaacttgacctccgttctggatcctgagtacggcggaacacgtgaaattccgtcggaatccgggaggaccatctcccaaggctaaatactccctagtgaccgatagtgaaccagtaccgtgagggaaaggtgaaaagcaccccggaaggggagtgaaatagatcctgaaaccatgtgcctacaattagtcaaagctcgttaatgagtgatggcgtgccttttgtagaatgaaccggcgagttacgtttatatgcgaggttaaagtgaaaagctggagccgtagcgaaagcgagtctgaaatgggcgagtgagtatatagatgtagacccgaaaccaagtgacctacccatgtccaggttgaaggtgtggtaaaacacactggaggaccgaacccacgtcagttgaaaatggcggggatgaggtgtgggtagcggtgaaattccaatcgaacttggagatagctggttctctccgaaatagctttagggctagcctcggaatattggatcatggaggtagagcactgtttggactaggggcccgtcatgggttactgaattcagataaactccgaataccattgatttagttccgggagtcagactgcgagtgataagatccgtagtcgaaagggaaacagcccagatcaccagttaaggtcccaaaatttatgttaagtggaaaaggatgtggcggtgcacagacaactaggatgttggctcagaagcagccaccatttaaagagtgcgtaatagctcactagtcgagtgccgctgcgccgaaaatgtaccggggctaaacataataccgaaactgtgggtggacacgtaagtgtccgcggtaggagagcgttctaagggcgatgaagctagatcgtaaggactagtggagcgcttagaagtgagaatgccggcatgagtagcgaaagatcagtgagaatctgatccaccgtatgactaaggtttcctggggaaggctcgtcctcccagggttagtcgggacctaaggcgaggccgagaggcgtagtcgatggataacaggttgatattcctgtactagtttattttgtttgaatgatggagggacgcaggaagctaaggaatgcacacgactggaaatgtgtgtccaagcaacaagtcttgagttgagtgaaatgcttgattctttaaggacaagttgtgatggggagcgaaattaagtagcgaagttcctgatgttacactgccaagaaaagcttctagtgagaaataaactacccgtaccgtaaaccgacacaggtggtcgaggagaatatcctaaggtgagcgagtgaactctcgttaaggaactcggcaaaatgaccccgtaacttcgggagaaggggtgctgaccgtcaggtcagccgcagtgaataggcccaaacaactgtttatcaaaaacacaggtctctgcaaaatcgtaagatgacgtataggggctgacgcctgcccggtgctggaaggttaagaggatgagttagcgcaagcgaagcccagaattgaagccccagtaaacggcggccgtaactataacggtcctaaggtagcgaaattccttgtcgggtaagttccgacccgcacgaaaggcgtaatgatttgggcactgtctcaacgagagactcggtgaaattataatacccgtgaagatgcgggttacccgcgacaggacggaaagaccccatggagctttactgtagcttgatattgagtgtttgtacagtttgtacaggataggtaggagccgtagaaatcggaacgctagtttcgattgaggcgttggtgggatactaccctaactgtatgaccactctaacccgcgccacttagcgtggcgggagacagtgtcaggtgggcagtttgactggggcggtcgcctcctaaagtgtaacggaggcgctcaaaggttctctcagaatggttggaaatcattcgtagagtgtaaaggtataagagagcttgactgtgagattgacaaatcgagcagggacgaaagtcggacttagtgatccggtggttccgtatggaagggccatcgctcaacggataaaagctaccctggggataacaggcttatctcccccaagagtccacatcgacggggaggtttggcacctcgatgtcggctcatcgcatcctggggctgtagtcggtcccaagggttgggctgttcgcccattaaagcggtacgcgagctgggttcagaacgtcgtgagacagttcggtccctatccgtcgcgggcgcaggaaatttgagaggagctgtccttagtacgagaggaccgggatggacatacctctggtgtaccagttgtgccgccaggcgcatcgctgggtagctatgtatggcagggataaacgctgaaagcatctaagtgtgaagcccccctcgagatgagatttcccattcctttatggaagtaagacccctgaaagatgatcaggtagataggctaggagtggaagtacagcgatgtatggagcggactagtactaatcggtcgaggacttaaccaaaggtgcaatgttaggcttttgaaatgaaaatattacttattatgcagttttgagagaacgaagttcttctcagtgcgcaagcacaaaatagtgtggtggcgatagcaagaaggatacacctgttcccatgtcgaacacagtagttaagcttcttagcgccgatagtagttggtgggaaactacctgcgaggataggacgttgccacgcaaattaaaaaggttgaacctcaggttcagccttttttgttagttatattttaattaggaaggaaaaaataatgactcaaacaattacagcaaacaatatagaggcctttgttgctgaagaaccgttagttattttagacttttgggcggactggtgtatgccttgtaaaatcatgacaccaatgattcaagaattgcatgcagcttctaatgacgcatttaagcttgggatggtggatgttgaagatcaacctgaattagcagaacgatatgatattcaatccgtaccaaccttattaatttttaaaaaagggaaggcagctgaaaaagtaactggtgctttccctaaagaaaaattaaaacggtatttagataagaagatagcagaatctaatcatgaaggctaaataaaaggcgagacatccaaattggacgtctcgccttttattttgttaagcttaaacaatacgacggacatagcgataaagtaataatgcgctaaattcgcagagtaggataagaacggctaatgggaggtaagtgtaactgcccatgataccgacaagtggtgataagaagatgccaaagacatacatgcctaatcctaaaacggatgaagcgataccggcttgtttgccttgtcgttggagcgctaatgaggtgacaacggcattgataagaccaagggttgaaacgactaggaataaaccaatcaatgccaaccaaagtttgttagggcctaagccactgatcaaaatacagaaaccaccgatgagccccccaatgaggcctaattttagttgttctaattcggtgaaccaattaatcagaacggttgataattctgccattaggataatcccaatgccgttaatcccgtagatgagactaaaagttgatttcgaaagtgaaaagacgttttgtaacataaaactagaaccagaaatataacagaacattgcgccgtaaacgagtccttggatgagtacgaaacagataaaggggcggtctttaaagactgtttgaacattgagtcgggtactggttgccttttgatcggctggggataacttgtgcgtttctttaaacccgaagattaacccgagtaataagagtaagccggcaccaccgatgaaaccgaagataccttgccaggaagtataacgcaacaggagactaccaattaatggtgagataatcgggaaaatcccgttaatggccatcaacaatgcgataaacttagtcagttgtttgccgttaaagagatccttggcaacggcccgggtgacaacttggccagcagaacttgcaagtccttggataaatctaagtaaaaagaataaccagatattatgtgtaacaagtgatagaaaacaagcgataatagccagtgatgtcccaatcaccaacggctttttgcgaccgacgcgatcactccaggcccccatgaaaatgggaccaattgccaaaccggctaaacacatcgttaaactgatctgaatcatggaagcggaagtgtgaaaatcagactccataattggaaatgccggtaaatacatatcgactaataatggaccataagcgcttaaagagccgagtagaacggatagccagatgatccttgattttgaataatgcatgaaaaccctcctagataagctgaaaaaaagtccaaaaaaatagcccgtcataaacgtagctctcgcagtacgtattcgaataggtgctataaatgttgcttccttattagattaacatagatgaggaagcatgaggggctctatgagcaatttttaatcagatttgttgtttctatttaagtttaaacaagttatgatggagatattgagaaaagaattgagtgtgggtttgtatgaaaattgcacaaaaaaataaaattctagaaacctgcttaattgcggggcgcatcatgatcgaaagtggttctgaaatgtaccgagttgaagatacgatgaatcgaattgcttataatgccggtattcaaaagagtgtggtctttacgacaccaactggcttatttatcgggatcgaaaatcaaccttatgtgcaattggaatcagttgcagtgcgtacgattaacttagaaaaagttgaaaatgtcaatacagcttcgcgacagtttgcgacaaaggaaattacgttagatcagttgagtacccgattaaaacaaattgaccaacatacgccgtattttccattatggattcaaattattgcggcggcctttgtatcagcgctattaatgattattttttccggtgaatatgactgggctgatttattaccagcggctttagtgggggcattagggtatgccgttttctctgaaataaaccgcttgactagcattcggtttatcggcgagtttttaggggccgtttcaattggcgtgtcagcttacttattaacgaagtggcacctaggggtcgatctcgataacattattatcggggccgtgatgccacttgtgcctggtgtggcaattacgaattcaattcgagatatgttggccggacacttattatccggaatggtccgtggtgttgaggcgcttttaagtgcctttgcgattgggactgggattgcgttaatctttagatttttaatttaatgaaggtggtgtgacgtatgccatattggctacaatttattgtccaagcgatctttagttatttttcaacggtcgcctttggaatctgtattaatttaccgcgccgagcattagtttggtgtgggattgctggtatgctcggctggcaagtttactgggtgttgttcaatcttggtagtggtcggatgatggctaatttatttggtgcgttagccgtcggcattgtcgggagtattttggcccgttacaaacgcatgcccgttattattttcaatattccaggcttggtaccattagtgcccggtggaacagcttatcgggcggttcgaaatcttgttttagggaacatctcacaggctgtgacgcagagtatttcagtcattatggtggccggcgcaattgcagttggctttatgtttgcacaaattctagcggatattacaagaaaaagaagtagtgtgccaatttggctttcaagacactaaaaagtatgttatactactgttatgcgatgagtcgagtaagtctcgataggcaactattctgcgaaagcagctaggagacccaaagatacaggatgccacgattattaatttaatcacttaccgtattgtaagggtgttttcgcccgctgtgttgtggagcacatggtgtttattcttcggaatactgtcgagaaagatctttccttttaggaaaggtctttttttgtggcttaaatcgggttttctgtaaattttagcttaaaaattgaaagaaataatgtgatttaatggccttttgcgaattatttcagaaattagggcttacttaatgcaaaaaaagtagttttcgtttacaataagtaagtattgaaaaggaaatgagggatagagatgactattacatatgttgtgatcaatattatcattatgttgatcatgttatttgttctaaataagatggcgcggattcacgttaaattcagtcgacgggttttcacggcattaggtgtcggtattttgtttggtgctattttacaattaatttttaaaaccgactcacaagtagtgaaacaaacggctgattggattgggattgtcgggaatggttatgtatcattcttgaagatgatcgtgatgccattagtcatggtttcaatcattcaagctattaccaacttagaaacatctaagggcttggggaaaatggccggaatggtcattggtttattagttttcacaacgttaattgctgcaactgttggttcagtgacgtcaaacgtgtttgatttaaatgccagttcaattcaatcaggacaagttgaaaaggcacgttcaaaagaattagaaacaaaattaggggatgtccaagaacaaaccgtccctgaaaagattgtcagcttcattccagaaaatccatttatggacatgactggtgcgcggccaacgtcaactttaggcgttgttattttctcagcgttcttggggctagctgccttacaattacgccggaagaaaccggaacaagcagagacgtttaataaaattgtcaatgccttttacgccgttatcatgcgaatggttactttaatcttgagaatgacaccgtacggggttttagcattaatgacaacgacggtggcccaaacagatgtccaaggtatcttgaacttagggaagttcgtgatcgcctcgtacgtcgctttaatcatcatgtttatcgttcatttcctattgatcacctttacgggcttaaacccaattaattacattaaaaaggttattccaaccttaatctttgcctttacctcacggacaagtgcgggctcaattccaatgaatattgaaacccaaacaaaacgtttaggggtcgaagaaggcatcgccaacttatcagcttcatttggcgcttcaatcggtcaaaacggctgtgctggtgtttacccagccatgttagctgttatgattgcaccaacggttgggattaatccttggagcatcggcttcttggttaaattaatcttaatcgtggctatcagctcatttggggttgccggtgtcggtggtggcgcaacatttgccgctttaattgttctttcttcaatgaacttaccagttggattagccggtcttttaatctcaatcgaaccattaatcgatatgggtcggacagcattgaacgttaatggttcaatgactgttggggtgttgacggcacaattcttaggtaaactagataagcacaagtttaatgacatgacgttaacagaagattctgacgatattgcttaattttaaattggagggataacaatgcgaactattattgtaggtgcaacggcagctggcacgagtgcagcggctaaggctaaacgaatgaacccagaactagaagttgtaatgtatgaaatgcgggattacgtctcctttggtgcgtgtggcttaccatactttgttggcgagcattttgataatcccaaccaaatgattgctagaacgcctgaagcctttgctaaacaaggcatcgacgtgcaattagaacatgaagtcgttgcggttgattttgacacacagatggttactgttcgtgatttaaaaacaaagcaagccaaaacagagcattacgatcaattaatgttagcgactggggcaaccgcagtcatgccaccgtttgaaaatggtcagttagataatatttatcatttacggacgttggctgatggtgaagtactccgtcaattaggccaaacacctgaaattcaatccgtaacggtgattggtgctggctttattggcttagaaattgctgaagagttccatcaattaggtaaaaaggtacgggttattcaattagaagatcgcgtcttgccacttgcatttgatccagaattaacggctatgatggccgctgatttacgcgataatggtatcgagttacgattatcagaagccgttcagtcatttgaagggcaatcgaaggtaacgggtgttgtaactgataaaggccgctacgaaacagacttggtcgttgtcgcagctgggattcgccctaatacgcaatttattacggatgatcggcttaaaaaacttaaaaatggtgcgattgtcgtcgatcaaacagggcggacatcaatcgaaaatgttttcgcagcaggcgataatgccacggtaattaacagtgtgaccggcgagcccatgtattctgctttagccactggtgctaacaagttaggtcgcgttgtgggcgttaatttagcggggcaacaagcgcaattaccagggatgctaaattcagccggggtcaagttagtgacccttgaagctggacggacaggattaacttctgccgaagcacaagcagctggcattgattatgatactgttttgatccacgataagaatcataccgattattatccaggacaatcagaactgacgattaaattagtttataaaaaagcagatcatgttttaattggtggtcaaattattgggcaaaaggatgcagttttgcgggttgatgtacttgcaactgccattcaagcgcaaatgacaactgagcaattgggactgttagacctcgtctacgcaccgccatttgcaagaacttgggatgcattaaatgttgccggaaacgtagcacattaagaaaaaggtgcgacaaattaaattttgtcgcatctttttttgttgcgtttcaaaaagtgtgaaagcgcgtaaacttgattaacggggctaaattgtgctaagattgcttttagaaattatttttttttaaagatatttaggatttacttacgaatattaaaaaatgccaaatataaaatcacgattaggagataagttaatgaacaacacgaagagtttaattgcacttggttcaggtatcttaggagttgctgggattagtttactcagtgcaggtcaagccaacgccgcaaccgcaacggtcaattactcagctggtgcaacgacagtttggacaagtcctgaaaccggccaagcagctaaaagatacatttttaaagggcaatcagttaatctactcgcttcacaaaaagtaggtgctgaaacttggtatcggattggtaacggcgaatgggtgccagaacgctatttgacgactgctaaggaaacacctaaggcacaaacagatgctgctaaaacgattcgtgttgcttttgcggatggtgcaacaactgtctggtcatcaccaacttatacacaacctaccggccgttatatgacttacggtcaaactgaaggcattgtaaaaacacaaactgtctcaggtgaagaatggtaccaattagctaatggcggttggattcctgctcgttttacaggtgaaggccaattgaagagcacacctgttgttaaacaagcagcaacaccaacgcaaacaacacctactcaagcaccagttcaatcaacgactgctgctaaggtagtgacaccagctgctgaaacagcaacatcagaaagtacatcggtagcaacaccagcgccagttgcctcatcatcagtttcagaaagtgttgcttcaagtacacctgtctcagaatcaacagcagctcctgttgcatcagaaagccaagctgaatctatttcagcgccagcggcctcatcatctgtcgttgaaagtagtagtgtaacgtcagaatcaacagcgccggttgctgaaagtagtgtgacatcagaatcaacagcacaaagctcatctgcatcagcagtagaagtacctgctaaagaagcggttgaatcagcaccacaagcgacaccaattcaagcagaatctgcgactgtttcatcaacgacaccttcaacaccagttgttgaaagtagtacacaacaaacaacacctaaagcaccagcacaacaatcgtctgttgccgaaagcaaaccagctgttgttgaaagtactaaaccaacaacgccaacacaaacaacacctacaccagcgcctacaacaccaaaacctgcaacaccagcaccaacaactggtaatgcacaagctgttatcaatttagcaatggctcaaattggtaaaccttacgtttggggtgctcatggcccaagtagctttgattgttctggtttgatggactatgtcttccaaaatgcagccggtcggagtatcggtggctggacagttcctcaagaaagtgccggttattctgtttcattaagcagtttacaacctggtgacttattattctggggtgcacaaggcagctcataccacgttgctttatatatcggtggtggtcaatacgtccacgcaccacaacctggtgaaaatgttaaaattggttcaatgcaatattacacaccaagctttgctaaacgtgtcttctaaacacttaaaaattaaaacatctcacgttctgtgggatgttttttgtgttttagatcaaaataagctatgctaggtagaacatcaaaaaaggactgatgaaatgaaaatcggcgtacaagcatttattaatgaaattcaagatcaaacttatttaacagatgaatatgaaatagcaacacccaacccatttgtggcagctgactttttggcacagttgaaacccgctgtcagtaaggctgttgaaaaacaagcattggcttctttttcagcgttgaccacttatgaaggcgaacaagtgaaggtgacgctagaaactggcgttgtgaatttaccattacaatacatcaaaaaggttaaccaatttttagaattagaagcacaagcagaagtgaatatctatctctatgtgacgtcaccactagtgaaccgctctggaatgcggattgatctcattggaactgttgttgactttgaagcacaagctgatcaagcatgggccaaagtcgaacaactattaacacaggatctagaagctgttgaagcaggcgctaagttagccaaagaagcgccagttgaagctcctaagacccctgctaagaaaaaagcagcacctaagaagaaaacggcggctaaaaaaacaacgactaagaaaaaggcgacaaccaccaagaagaaacctgcggcaaagaaaacaaccactaaaaaaaaaagtgatgcttaaagcatctattaaaaaagggtctgggacaaaagtaaattttgtctcagacccttttttgatacttgaatattgatggtacatttttttaatctgcttgttcaattgcttgttggattggtaagtcaccatttacaaatgaatacttgtggtgaattgtttgggctggattttcaagaacggcttgaatcattgctgcaacatcagcacgggcaactttcccgccagttggttgcatagtgaattgcgctgtaccggcatcattggttaatgtgccgggtctgaggatagtccagtccaaaccagagaattcaagccagtgatcagcatagtatttagcggcataataaggcttgatgctttctggccattttgcacgttcttcaacaaagagggcactgaccattacatagcgcttaacatcggcgattttagcagctgccatacttctaacagcaccgtctaaatcgactagtagcgtttggtcgtcgccagttttaccaccagaaccagcggtaaagacgatggcgtcatggtcagcaaaaagaggtgctaattcttttggttgtttcgttaagtcaaatgaaacgggtgtcgcacctaatgctgtcatttcagatgcttgtgcatcattgcgaatacctgcagagacgttgtgacctgctgcaacgagtttggggattagtaattgaccaatgttaccatgggcaccaataacaaatattttcataatagagactcctttactgattatcttaagattcattatagtagttattattagtaagtgcaaagtaaaaggtccgtgttatagcacaattagtaaaacaattataaaccgttttttctaatgacatttatgagatttaaataagaaatataggcgatgcatagacgttaaataaacctttttatataattaacatggtaaagcttgccaaccatttaataaccttctcataatcacataaatatgcttattgtaatataatgaactgttattcaatttgtgttatggtacaggtataaggattgtgatgtattttacaataacctaatttaacaagctgttatttaatttttcttgaggagaggcgtttagaatgacaaaccaatatcgtagtgtttttgatattattggaccgattatgattgggccttctagttcacatactgcaggtgcagttgctatcggacacgttgccaatcgactttttcatgcgccaattaaaaaggtgattgtgcgctattatgaatcttttgcacagacacaccaaggacatggaaccgattatgccattattagtggcgttttgggattcgatcccgcggatcaacgggtaccaatggcggttgatttagcacgacgccaagggattgaagtcgaatttattgaagaccctggtgacagtccagtcaatcatccgaatactgctgaattaacacttattaattcgcaaaaatcattaacgatttggggttgttcaattggcggtgggacgatcgaaattcggaaggtcgatttaaacggcattatcttccaaccagatggcccactacccattattttcgtcgaatctgatcaagaaattgggacagctttggaccacatcttcaaggataattatcggggtgctcggatttcggttcgtgtaccaggtcggttcttgtataaattagaattacttgataagccttatccagaacaggttgaacaggttcgtggtatgagtaaagatatgattgtattatagaaggcggtgaaatgtgatgtacacaaaaattcatgaattagttcaaacagcgcaagaacggcagttacctatttcggaattaattattgagcaagaaatccagatgagccattctagtcgagaaattatctgggcaacgatgggcaaaaacttagatgtgatgcttgctgctgaagaaaaaggggtaaccggtgaaggcgttcagtcagcaactggaattaccggtggtgaagccgttttgatgaaacggtatcgtgaaaaagggcaatcactatcaggcgatatcatgttggaagctgttcaaaatgccattgcgacaaatgaagtcaatgcgtccatggggattatttgtgcaacaccaacggcaggttctgctggtactttaccaggtattttatcagtgattacgaaacagttatcactagaccgtgatgcgcaaattcgtttcttattttgcgcgtcagcttttgggatggtcgttgctaacgatgccatgattgctggtgcaacgggtggttgtcaagcagaagtcggaagtgcctcagcaatgggtgcggccgcagcagtcgaagcagctggtggaacaccacaacaatcttcagaagcttttgcaatggctatgtctaatttattaggcttggtttgtgatcccgttgcagggttagttgaagtaccttgcgttaaacggaatgtgattggttcagtcaacgctttaacaagtgctgatatggcacttgctggtttagtaagtaagattccagccgatgaagtcattagtgcaatgaagagtattggtgaaaacctaccttcaacgctaagagaaacgggcttagggggcctagcggcaacaccaactgggattgcgcttaaaatgcaaatttttggtcaagatatgagtattgataaataaatagctttgctattttaggaggaaattcgatgcaaaagaagctttcaaaatcagcatacggtggcgtttcgggagaaaagtatgtcccgtatgtcagccaaggtaataagaaagtcggtaatacagccattttaattatggggagcttattagctattattttcgcagcttccacagcttattcaggaatgaaggccggtttaactgttgcggccgggattccgggttcaattattggttcaggtttagttggggctttcgctaaatcaaaagggattttaggtaaaaatatcatgcaagggatgtccagtggtggggaatcaatcgccagtgggatgatctatgttttaccagctattgttttaatcggtggtcatattaactttatcgaagggttaattgttgggattttagcaattctcttttcaattgggacatcttcattagtgcataactacttagttgttgaagaacatggtaacttggtttatccagaagccatggcgatttcagaagcgttagttgcttctgatactggtggcgattctttgaaatatatgggaattggctttggtatcggtggcgttattacgatgttaacaacttctgtttttggtgttgttaacaacatgatgaactatgttggctcatcattttataaatggaaattagacgttgaagttaaccccttactagctgggattgggttcatcgttgggttagaagttgcattaacaatgtttgcgggtgctttattatcaaactttgccattgcaccacttatcggttactttactgatatggctggcaacggcgctcacgtttggaataacgcaagcttagctgttaaccaaatgacagttaacgatttagcaagttcatacgttaaatatattggtgctgggatgatgctttgtggtggtttaattggtgccattaaattaatcccaacaattgtcacatcaatcaagaagacattaaacgctaaaaacacaacaggtgaagataaaaacacacttggcatggtttcaattgtacttggtgctgttgggatttttgtaattggtattattattgcccaaaacttcatgatggggattgtcggtgcattattagctgttatcttaagtttattatttgttatcgtatcagctcgaattgccggcacaattggttgttctaacttacctgtatcagggatgacaattgcttcattagtgattatgacggttgtcttcgtcttattcggttggacaagcaatgcgcatacacaaatcttattaatgtttgggactttcgttgtgacagcaatcgctgttggtggtggctacatgcaatcacaaaaagtaacttatgttatcggtggttctaaatcagaaatgatgaaatacttcatgatttcagcatttatcggtgttgttgttgttattgggacaatcagtatcttatcaccacaatttgttacagacagtgcaacacctgcttttggtttgccacaagctaacttaatcgcaacgttaacatcagggatcatgtctggtgaattaccatggattatgattatcgttggggttgcaatggccattgtattatacttcttagaattaccaattatgactgttgcaattggtttttacttaccaatttcaacaacatcaatcattttaatcggtgctttaattaaagtgttcatcgataaagttactggtgatgaagctgttaagaataaccgaatccaaagtgggattagtttatcttcagggttaatcgctggtggttcaattatcggcttaatcgggattatcctccatgtcacaggtgttctaaaagaccgcgtgatttcagggtttgcaagcagtaatgaaatggcattgattctcttagttgtcatgattgttgcgattgcagcaccattgatgatgatcaaaaaaggaggagatagcgaagatgaggaagcaaaaggctgaggttgatttaaatcaactaatctttgctaaagtaccagaagttaagtttcaattaaaagcgggacaggtaactattattcgtcctcaggatcattggattcaacgattctttagacggttacacatcagaattccagctgaatcaaaattgacgctggatgattatggtagtttcgtatttagacacgttaatggtcagcggagtgtttatcagattggccaagcactcgcagccgaatatgatgaaacaaacgactatctatatgaacgattactcgtttatttaaatcatttagaacaaactgaacatttaatcaaacgtgtgacggattgagttaattaaagttgtgaatcatgattaaaatagcttatagatgaaggagtttttcaaatgacagacagaatcgagttatccgcatgtacttcaatgatggtgggcaagaatgcgtcaattgatggctctacgatgatttcgcgtaatgaagatcgcttttatgcgatccaccctaaacgtttcttcgtacaaccagcagtgcacaatcggcatgaaacatatgtttctaaatataacgggttaaccatgccattaccagaagaaggttatcgttatacttctacccctaatggtgatttaagtgatggtttgaatgaagaagacggcattaacgaaaaaaacgtcgcactttctgcaacggaaagtgtctacgctaacgaacgggttttagcatacgatccgttgattaagaatggtttagcagaagactcaatgtgttcactcgtattaccatacattaactcagcacgtgaaggggttaaattgatgggcgatatcgttacgaaatacggctcagccgaaggtaatggtgttcaatacagtgacgaaaatgaagtttggtatcaagaaattgtgacaggtcaccactgggtagctgttaagattccagacgactgttacgcagttgcagcaaaccaagttgcaattgaaaatattgattttaatgaccctgataactacatgtggtcagaaggcattcaagaatttgttagtgaaaatcacttgaacccaagtgaaacagaatggaatttccggaaaatttttgggacagatacggaaaaagaccgtcactataacacaccacgtgtttggtacgcacaacgttatctcaatccagaaatcaaacaagaaccagaatcaagtgatttaccatttatccggaaagcaaaccgcaaattaagtgtggaagatgttcaatatgtgttaaaatcacattataacgaaacagaatacgatccacttggtaatgggacggaagaacaaaagacgacttatcgtgcaatttcgctttcacggacacaaaattcccatatttgtcagattagaaataatgtgcctgatgcggtgaaaggtgttcaatggttaggttttggtgtaccgacattctgccctcacgtacctttctttacgaatgcaaatgatacggatgaaacttatcgtgaattgccagaaaagatgaccttaaagaatgcttattggttacatgaagcattagcaatgattgttgaatcgcattatggtgcgtttaaacaagctgatatcgattatcaaaaagcattatcagaatgggcaagaactatgattgctgcaactgataaagcaattgaaaatcaaactgacgccgtagcctttttgacagctcaaaatcatgagattgcaacgcattataatgaagcaacaactgatttgttagcacagttagtcacagaaggtacacaattgtctaagttgacctttgtaatggataagaatctttaagaaaatcggacttttaattaatttgtcacacttccaaggggggagtgtgactttttttgatggaggtgctgagaatgactgatttaaaaatgagttccaagcggattgtaatcgcaatggtgtatggctttttagcagcggtcagtgtgaatctattcttgattcctgctaagacgtattcaagtggtgtgacgggggttgcacaattattaacagcgctagtgtcacaccttggtggttctttgagtgtggcggccttagtgtttatcctgaatgtgccgctgttagtattggcatggtttaaaatcaatcatcaatatgcaattttcagtattgttgcggtttttacaagtgtcatttttctaaaaatcattccagtaccagttcaacctattttaacggaacgctttgcgggtgctctgtttggcggggcattaattggccttggtgttggtctttgttttagagctggtttttcaactgggggaacagatgtcattgtaacgcttgtcggtcgattgacaggtaaacgggtcggtgttgtgaataacgtcattaacggcatgattatcctcgctgccggcattttctttggttggggtgctgctttatatagtatcgttgaaatcttcgtatcgagcctgttaatggactatatttacacacaacaacaaaaggtgacagtaacgatctttacaaagcagccagaggcattaaagaagcgaatgcgcgaatttatccatggtgcgaccgaattagatgggacgggcctatatacgaatcaggagacatctgtgattatgacggtcgtttctaaatatgatttgaccgcccttaaattagtggtgcaagatgcagattcaaatgcgtttgttaatattcaatcgacaatgaatttatggggtcgctttgaaagtaatgaataaaaaagagccgattcaacaagattaattgttgaatcggctcttttaggactattttgttttagcggctttcaattgtttaagattaacaacaattttgttgtttaattccgaaacgttagctttatcaactgcgtcgaaatccgtgatggtgactaaagctgagttttcatataccttttcgacagttcctgtaaaagctgactctagatcttcgttgactttaccagtgacaatatcaccgatattgagattttctttatccatcgtaaaaactcctttagacataataaaattaccaaataaggtgataataaactatgtcactctaaatagcaagctctaaccaagtaaaaagaaaataaatcggtgacacaattgctgatagctatttaatttataaagtaaataggctagaatagagttatgttagcgattacaaaagcggctgaaaaaggagttattatggaaccttacttagttttttcagatattgatgggacattagtcattgatcatcaaattgtcacaccatttacgaagcgggttattcgagaactacagcaacgagatgtgatattttatattgcaaccggacgaatgtataatcttggaaaagtaattgcacgtcaaattaatgatgatgcacgaattattgcctctaatggtgctgtatttgaaaatgagcaaggaagtgttcaacatcatttaggccacgcggccttaaaagcggcttatgaaatcacgcaatcagatctcagattatcagctcacttttttacaactgatgcggcctattatacgcgtgaaatcccacggttcgtcgcacgcgatgcggggaacctcactagtatgggggctgaaattaactatgattcggtcgctgatctagacagcttgttggcaatgagtgatcaaattattaacggcatcattgtttgccaaggtacactcgcattattggcttcagtcaagcaacgtcttggtgaacaagatgtgatgagtttatcatcatctggtccggataatatcgaattaattcctaagggaatcgataaggcaacggcgattcgccaaattcaaaccctacatgggattgatgcagatcatacctttgtttttggggatggtcaaaatgatcttggcatgttgcgagctgctaagtatagtgttgccatggggaatgctttgcctgaagtcaaagcggtcgcaaattatgtgacggaaaccaatgtgaatgacggtgttgccaagtttttacaacaacattttgagctatcattatcagattcagaagttggtctttagggacttgacccgctttttatttttcgatatacttatatcacggtcattaattagccgtgattatgctgttttagctcagtaggtagagcatcaccatggtaaggtgggggtcgtcggttcaaatccgataaacagcttaataatattttagagtaaagactgttgcaagtgtgcaacggtctttttttggacaaaaaaaggaaacgattaggcaatcgtttccttggttgttgtaacgttctgatagtattgatgatctaaatcagcaattagcgggctgagggtgtcaatccctaacaaagttaagtcatgcattgcacgcgtcatcaatgtatagagtaagtcaacgtcgcttgcttggccgaaggttgttgctgaaatatcgtagccaatgacggcatcgaattcaagccctttagcgaggtatagcggtaataccaagacgccttttggcaatgagcgggtggtctcggagatgagcgttacctgatcatcgggggtgaggctggcgaaaagttggcgcgctgtttgttgatccttggttaaaatggcgatggttgcatgccgcttttgcaggtggaaaatttcctgcgtcaaggcatttaaactagcagctttggtggccgtgataacgcggggaagccgaccgtcacgactaaaggcctgcaaggctgtttctttaggcagtagggcctttgcaaaattcgtgattggggcagtcgcgcgataactcttcgtcaaactgatttggttagtttttagttttggaaaagccgcacagaggcgctcgatgaaattaccggcttggtaagtagcggtaaaaacatcttgtgcgtaatcgccaagaatcgtgaatttagcgttgggaaaagcatgctggagatagacaaattgcgcaatgctataatcttgcatttcatcgatgaataagtactgaatactgtgattttgaccactatcggttaataagtcacgaagatataaaataggggctgcgtcactcaaaccaacgagatggcgttcattattttgggcaactgtttcaatcattgcagcccaaacggcggacgggattgtctcaggacaggctgttcgtaagaagttttgatattcagtatacacatccaagaagtaatcgttataaatagcatcgtataaatcagcaaaataattttgaacaatttcccgggcaataaaagcttgctctaaatcgccggaatcaaattcgcgatcaccgacaatggcgcggtagtcatcatcggataaggtatcaattttttcagcgacccaatcaaggtgcacttctaaattgatctggcgtttgagccgcttaattaaggtgttcttagtagcaataaatttatcaccaggacgcatgttatgtggaaggtcgagatagattttattgatttgcgcttttgtgaagaaaggccgatcttcaaagtagaggccattgaaggcaagcggttgtgtagaaacctgtttaacgtaggccgcaatttgttgcataaagggcgcactttccttaaagcgacgcattgcttgggtcatttctgggaaacttgcttgatctttttcaaagcggtcgaagagtgtttcaacttggagtcccgagaaacggtggcttaaaaactcagccattgtcacttggcgcatgtttttctcgcctaagctggggagaacgtcagaaatgtaatggctgaataaacggttaggtgaaaaaggaaccatctggtcggcttctaagttgctacgactgtgatagagtaagaaggcaatccgttgtaaaaccgcagaagtcttaccactaccggcgacgccttgaacgattagtaaatcggcagtcgtatcacgaataatatcgttttgttctttttgaattgttgcgacaatattttgcatatattcgtcgctttgttggccgaggacggcttgcaggagttcgtcaccaaccgtttcgtttgtatcaaagaggtgttcaatctgaccgtttttaatcttgaactgccgttttaaagttaagtcaactttaacggggccgttgggcgtatcgtaactgacggttcccagtgtgccattataatagatactagcgatgggtgctcgccaatcataaactaaaaattggtcttgttcgttgataaaagtggcggttccgatgtagagtgattcttcttcaccgtcttcattgatatcaatccgaccaaaatagggggagtcaactaaatccgttagtcgtttttgttgtgtcgttaggagtttctcgttttcaacggcagctgcgaccagttgcttttgctgttggacagcggcattggtttccatccggtcatcaacttcggtaatgttaaccttggtagtatcaccgtaacgttgctcaatatctttagtttcattataggcgttgtccaattgttggttgataaccgttagccgttgattgacttggtcaaccgttaaatcaacacgagcttgttcttgttgttgcgtttcttcttgtagcatggcgacctccagatgttagttgttatattatagtcgtgttaatggaaaaaagcgaccgtttgacattcattttaaaatccgttagtatgacagtaattcaacaaacagagtgaaggataagtagcaactttaactttttgcacaggaagcggcggtactgagaagtcgtcaaaagcaagttgtgaatggccctttaatcgggagctggtgataagctagttcgggtagcgcccttatcgcataagtggcacgattttttcgtgcaatttaggtggtaccacgtctaagcgtcctaattgtgaacaacaattaggacgctttttttagttgataagtaaaaattggaggatattattatggcaaaaaaaattatcttaaccggcgatcgaccaactggtaaactacacatcgggcattacatcggttcattacgtaaccgggttgcgatgcaagactcaggcgaatacgaaacattcattatgattgcggatcaacaagccttaacagataatgcgcgcgatcctgaaaaaatccgtaatagcctcttccaagtggctttggattatttatcagtgggcattgatcctgctaaaacaactgtttttgttcaatcacaaattccagctttaagcgaattgacgatgcattacttgaatcttgtgacggtatcgcgtttacaacgcaatccaactgttaaagctgaaattcaacaaaagaattttgaacaaagtattccagctggcttcttaatttaccctgtcagccaagctgctgatattacagcgttcaaagcaacaactgttccggttggtgatgatcaagaaccaatgttggaacaaacccgcgaaattgtccggacgttcaacaacgtttacggtcaagaaattttggttgaaccagaaggcgtcttcccaccaaaaggtgaaggtcgtttacctggtttagacggtaacgccaagatgagtaaatcattgggcaatgccatctacctatcagacgacgctgaaacgcttgaaaagaaagtcatgtcaatgtacacagatccattgcacatcaaagtaactgatcctggtcacatcgaaggcaatacagtctttacttatttagatgcctttgatgacgaccatgaaaaagtggctgaactcaaagcacaatatcaagctggtggtttgggtgatgtgaaaatcaaacgttacttaaacgaagtcttgcaagctaaattcgcaccaattcgtgaacgccgtgctgaattcgaaaagaatccagaagcagtttacaagatgttagaagaaggtagcaagaaggctaacgcagttgcagaacaaacactgaaagaagtgcgtgatgcaatgggtattaattattttaactaaatcatccatttggaaccaagttggctatgccgacttggttctttttagtgagtgctgatattttaaatctttttaaatttcaagcaatcaaccccttgtattttattgattttcaagtaacctaaagagtaacaaatagggaggaaagtacatatgcatgatttaacaaagggaaatccgctgaagttaattataatgtttacgggaccattattgattgggaacatcttccagcaactgtatagtgttattgacacgctaatcgtaggtcggacaattggggtcaatgcgttggcagcagtgggctctaccggcggtttaaacatgttaattattggcttttgtactgggacgactgcggggctgtctatcatgacggcgcagcgctatggcgcccaagattataagggtgtcaagcgcagttttgccacgagcattgtgattagtgccgtgattacgctcatcttaacggttattagcgttatctttgcccggcatatcttagtcatcatgaagacgccggcaagcattatcgttgatgcgcagaaatttatcacgattatttttgcggggatctttgcttcgatggcctttaacctgttatctaacattattcgcgcactgggtgatagtcggacaccattatttttccttgtgattggggtaatcgtcaatatcttatttgactttatttttattttgggattacacatgggtgttgaaggcgccggctatgcgacagtttctgcgcaaattattgcggctattttatgtctagtgtatatctatcggcgcattccaatccttgtgttgcgtcgtaaggattttaagattactaaaaaggatattacggaccatttaaaggtcggcttaccgatgggattccaatcatcaattattgcgattggttcaatcgtcttacaaattatgcttaatacgttaggtgccagtgccgtggcggcctacaccgcagctggtaagattgatcaattagcaacccaagttgggaactcatttgggattgctttggcaacttacgctgcgcaaaactatggtgcacgcgaatatggtcgaattagtaaaggggtccgtcaaacattaacggtctcgattatttttagtttagtgatgggcgcgctaattattatcttcggtcggccattggttaaccttttcatcggcgatcaacaaccgcaagttaccgccttggctcaaatctacttccgctttaatagtagtagttactttatcttggcaatcttatttgcgattcgctataccttacaaggtctggggcaaagttttatcccaacattggcggggattgcagaattatttatgcggatctttgccgggattatcttagtccgcatgttgggcttcaccggtgccagcatggctaacccgcttgcctggattggctcatgcttagtgctattgagctcatatttcaagacgatgcaacaattgaaacgacgggcagctaaacaaaccttagaaaaggagtcacaggatgtttaaaaaacgattcattggcgttgttgcgctattagcacttgtattagcgggctgtcaggctgaacaaacaacgacccataaaccgacacaaacaacgacgactcacaagcaaacaaaaacaacgaccattttagcgaataagacgtttaaaagtggtgataagccatatctggttgttaaccataacaaaccgacgttagatgtgcgccaatggcaaaccgaacggattaaatatggggcgttagacgatttgaatcggacgacaaccaatacagcttatttatcacatgatacgttgggacgttccaatacacgtgaacgccaaaattggcggccaaccggctggcataaccagcccgtgatgattgatggccaccgagtaatacctcagaatcgtggtcatctgattgcctatgcaatatcttttaacttcgatgaagatggtatttttaagaagggacaattgggcagtagtgacaatcctaagaatttagccacccaaaccgaattcagtaaccagcggacgatgcagatttttgaagatcaggttcgccaagctttaattcggcataaaaaagtgatttatcaagtgacgactgttttccgcggatcagaattgatgccacgtggttattgggtacaagcaatttcaacagataagacattgaattttaacgcctatgtttggaatgttgagccaaagatgcagttcgattatgcaaccggccgtggtcgtgttgatcaaacaatgaaggttgccgattattacccgggcaatcgttatacaaaatagtaattaaaaaagattggcaaccaagtttgactgccgatcttttttaattagaggagaaatgatgatgacagtaaaaaaagcacaagcaccgattttaatggcaactttaagtccctaccaggaagcatattttgaaacggatgaagcctatgaaaatcagttaattactgagatgccgttaaaagaagtcacaattaatatggcctatttcaagggcagccactttaaaaatgtgcaatttgaacaggtgacgtttgataattgtgattttcaagacgttttttttgagcattgcgcgttattaaactgttcgtttatcggcaatacttttcagcgagtggcttttgaaggctgccagttagtcggggctgattttgccgaagctggtttgcgggatgtccgctttgttgcttgcaaactggattatgcggggttcaaccaaacacgaatccgacatgtggattttgaagaatgctcgctacaagaagtggcgtttgaatatgtcgactggcagtggttgacgatgagcggtaatgatttgaacgggattgatttgacggggactaatttaaaacagtttgatttgagtcagaatacttttgaaaaggcagttttctcactcgatttattgcgtggcgcaaccgtcagctctgcccagacgttagtcattatgagtgctttacgaattaatgtgcgttagatgtaactaacataattgtcattttgctgagtttttctgttggatagcttataattaaggtatctcattatcaagaggagactaaaatgaaaaatttgggtagacgcatttatcaaggaatccagcgccatttaacactattaaaaggcctcttcatcttatcagtcttagtatttgtgatctttgaagtcggtcgtatttttcgagatctcaacggagaacaattacgcgcaagtttgaccacgcagagtccggtaacgttactagcgatgctcgtaattggttttttagcgatattaccaatgctcaattacgactttgtcattgcggagttgttaccagaagagtattcgttttggtataaggtcaaatcggggtggattgttaatacatttacgaatatcgccggctttggcggctttttaggtgctagtttacgggctaacttctacggtaaaaaagcttcgcaaaaagaaatcttaattgcaatttcaaagattgcactctttttattagcgggtctttcgatttggtgtttaattagcatcgtcttaatctttggctttggcattggtcaaatttatgccaactactggttatggttagtcggcggggcttgttatttcccagtattactcggaagtacccgtctgaagaacgcggcattttttagtgatttatccgttaaacggattttgcgcttaacggcaggctcattctttgaatggggttttgctggtggcttcttcttgctgatcggttatttcttggaaatcaaaggtgacttattacaagtcctaccattattcatgattgccaacatcattggggtcatttcgatggtgcctggtgggttagggacgtttgatttattcatgatctttgggttgagtgcaattggcgttggtaatgctgatgcagttgtttggttatcattctaccgggtattctactacatcatgccattcttggtgggggttggcttatttacccacgatgcgggtagtcgcttaaatcactaccttcaaggcctaccacggcagattatgcaaaaaatcgcgcaccactttatcgtctttttcctctatatttcggggattattttactattagtagcgactgtgccaaactttgcgattaccaataccgtgatcggtcaactttatccttacacgttctttttcctagaccgggtgacgaatattatcgtggcctttgtcatgctagggttagcacgcggggttgctaaccgggtaaaacgggtttattggccattgatgattttattggtgattgcgattgccaataccctatggcgtgacttctcgattaagttggctgttttcttgatccttgtcttattagctagcctcttattgaaacgggaactttatcgtgaaaagattgaattctcatggaatgatcgaatcgtcgatggcgccatttttgtcggcgtcttcttgctatatagttttgtcggaatcgcgaactcaccacacttgcatcaccgtaaaccagtaccaacggcgttattattcccgtcggaacgaatttggcttgtcgggtttgttggcttgttagtggcagcggcaacgttgttcatcgttttccgctatctaagtcgtggtgggcataagatcgcaacaccgtttgatgaagcgcgcattagcaaggtgatttcggaatacggcggcaatgaagttagtcatttggcttatctaaaagacaaatcagtttacttctatcaagaagatggcgaagatcaagtcttcttgttattccgaaaaaaagcggatcgcttgattgtgatgggcgaaccagtcggaaatccagacaagttcatcgatgcgattgaagcattgatgcgcgaagccgatttgattgattgtcatttggcgttctatgaaatctccgctgagttaacaatgcaattacatgaaattgggtttgatttcatcaagtttggtgaagaagggtacgtgaagctggctgactttacgttagttggtaagaagcgccgtgctgagcgggccttgatgaataaatttgaacgtgaaggttatcagtttgaattattgacgccaccattttcagatgacttaatggctgaattgaaggccgtttcggatgattggcttgatgggcgggttgaaaaaggcttttcactgggcttcttcgatcctaattatttacaacaggcagccatcgctgtgatttatgatccagagcatcggattgtggcttttgccaatgatatgccaactgggacgaaagaagtttcaagtattgacctcatgcgccacagaaaagacgcgccatctggtataatggatgaagttttcattagtctttttgaacacaacaaagcagaaggttatgagtacttcaatttagggatggcgccactggccaatgtggggacgtcagaattcagttttattgaagaaaaaatcgcgcatttgatttatgaatatggctatcacttctacggcttccaaggcttacggacgtataagaagaaatatacgacgaagtggattcctaaatacattgcttatcaaaagcggacctcaattatctttacgatgctccaaattctattagtggtgaaccaaaaagtgacggagacaccacaacgaaaaggactcgcaggtcattttatgcgttttgttcaaatcggcaacttaactaacaatcaagacaaatgaggttcttaaatgacagattattattattcaaaaaatccggaagttgaacacgctgagaaaaattggacgtttgaactacggggctttaatttcaagttcacgactgacaatggtgtgttttccaaaaatactgtggattacggttcacgggcattgttagatgccgttgatttaagcgagacgccagcaggtcccatcttagacatgggttgtggttacggcccaatcgggatgacacttgctaagttagcacctgagcgtcaaatcgacatggtcgatgttaacgaacgcgcgcttggcttagcacaaaaaaactgcgatttgaatcaaatccaaaatgttgcaatctttgaatcagctgaatatcaaaatgtgacggcgcaatacgctgcgattttgacgaacccaccaattcgagctggcaaagcagttgttcaaaatattttgaagggtgcctacgatcacttgctaccagatggtgaattagacgtcgtgattcaaaagaagcaaggcgcaccttcagctaagcaattaatggcggatacttttggcaatgtacaaatcattcataaggataaaggctactatattttacaaagtattaagttaaaataatgttgagccgataagacgtcaaacaggctgggatatgctaaaatagggctatagtgtaaggaggttgatacaatgaaaatgagatataagattctaattggtgttggtgtcacagcgggggtcggtgcaacagctgctttcgttggttctaaggcaatcatcgagaaagttgaacgctaccgtaaacgctcggcagttaaaaactttgtcaaagataaactacatggtaatcaaaaggcattggaattggttgatcaactttccgatgcagacgtgaataatttattaggggcggctgataagctcaaccaattaaaggataagctaggcgaacaaaccgataatattccagaaatgatggaagacttacggcaaacgttgacggcttatgcgacgaaagtcaaagaacggctataaaaaacgactaagagtgtttctaggacaaagatgtcttttgttttagggacactcttttgattggtaaaggggttagtgaattgggatatacacaaactgagattgatcagtggatgcaagttgcaattgatgaagcgaatcaggcacggattattggtgaagtgccgattggggcggtcatcgtgaaggatggccagattattggtcgggggcacaacattcgtgaacacgcacaggatgcaacgttacacgcggagatcatcgcgattcaagaagcttgtatggttgaaaagagttggcgcctagaagacacggcgatttttgtaacgttagaaccctgtccgatgtgtgccggggccattatcaacagtcggattccaaacgtttattttggcgccagcgatccaaaagccggcgtgaccggtaccttgatgaatcttttgacggacaaacggtttaatcaccaagcgacagtggtggctggtgtgcgcgaagctgaatgtgccgccttattacagacctttttcaaaaaaattcgggaaaatcgacgaaaaaagaagaaaaaaactggtaattttaaacctaatcgggtagaataagagttgccgtaaggccttgagacaatgatgagcctacgaatcgtgtcaggttcggaagaaagcagcactaagtttgttttatcatgtgtcttaagttttttagaaattaaccaggattaggtcaatatgacttaatccttttttagtgcctagtgtgtttcaggtggtcatgttgtataggattagcctcgtcgcgtgaataagcgacgaggtcgattgtttgcgcggcgccgctaaccgtaacaatatgtctgaaaaagcacgttgattcagaagatgcagggagactgaagctaaaattatttttggagcagtctcttttttagtgcctttaggccctaaaaaatactgtaaaatatgctaaaatggaacaagtagtttttttaaataataggacgattaggtgaaaggcggaggtcattaaatgagctatcaagctttatatcgggtttggcggccacaacggttcgatgatgtcgttgggcaagaaacaatgacccaaacattaaaaaacgccatcatcacaaaacagacgagtcatgcctatttatttacggggccgcgggggactgggaaaacgtccgctgcgaagatttttgccaaggcgattaattgtcattatcaaaaagatggcgaaccttgtaatgaatgtgaaacgtgtcgggcaattactgccggtgcgttaaatgatgtgattgaaattgatgcggcttcaaataacggggttgaagaaattcgggatatccgggataaagcgaagtatgccccaacccaagccgattataaaatttatattattgatgaagtccacatgttatccaccggtgcgtttaatgcgctgttgaaaacattggaagaaccaccagccaacgtggtcttcattttagcaacgaccgaagttcacaaggtgccagcgacgattatttcgcggacccaacgctttaacttcaagcggattacggctgctgatttattcaaacggatggcttacatcttggaacaaaaagaaatgacttacgatccagctgcgttaaaagtgatcgctaaagctgctgaaggtgggatgcgagatgcactgagtatcttggatcaggtcttatcctttagtgataatcacgtcactttagaaaacgcgttggatgtgacggggagtttgacggaagctttactagccgattacgtacaaacaattcacgatcacgcgcctaaagcagcgttgcaactattgcaacagatattagctgagggtaaagatgcccaacgctttgttgaagatttaatcgaatatgtacgtgatttattgatgtatcaacaagcacctgaattggtaatggctaatgaaatggatttattggacgaacacttcaaacaacttagtgatgccttgagcgccgaacaattgtatacggtgatcgatattttaaatgaaacgcaacaacaactacggttcactaatcatccagaaatctatttggaagttgcaacggtgcgtttgacgcaacaaccagtggcacctgcggccgttagcgccaatgtttcagccccagccgataatgagcaagtgacccaattaagtcaacaagttgctcaattacaagctgccttacagaaattagaaacggccggaccaagtgcgcctgttcaacaagcaaaacctaaaccagctaagaaaattagtaagaaggtcaaccgcaagttgatttatccggtacttgcggatgctactcggactaatttagaaaacttaaaagaagtttggccagatttattaaatatgttagatgttaccaaacgagcgattatgcgggtttctgaaccggtagcagcgagtcaaagtggcgtcgttgtcgcttttaactacgaaattttattcgaacgggctaataacgatcaggatttattgacggtcctagaaaacggcttaaaccggttaacgggcaatccgtttaaagtggtcttagtaccgcaagataattggccagaaatccggaaagaatatttgcaaaatcatgcggtttcaggtcataataatgaggaccaaccaacgacgactaccgaaaaagcaccggcgcctgaagttagcgaagttgtgcagcaggcccaagcgttattcggggatgcagtcgttgttcaaaaagattaatttaaaaattgagaggatgttttaaaatgcgcggaatgggtaatatgcaaggtatgatgaaacaaatgcaaaaaatgcaaaaagaaatgggtcaaacacaagacgaattaaacagcactgaattcgttggtaaggctgctaacgatgctgttgttgtgaccatgactggtgacaagaagatgaaagatatcgccatcaaaccagaagctgttgatccagatgacattgatatgcttcaagatttaatcatcatggcagttaacgaagcaatggttgatatcgataaacaaacacaagctaaaatgggcaagttcacaaagggcctcccattctaaggtaaccgaataaggaagtgcacatatgcaatatccagaaccaattgcgaagttgatcgaaagttatatgaagttaccaggcattggtaacaaaacagcaacgcgattagctttttatacgattgatatgaatgaagatgacgtgactaactttgccaagaatctgatttcagcacgccgagacctccattattgtagtgtctgtggcaatatcactgatgaagatccttgtgagatttgtcgggataccgcgcgtagtcaggaaatgattttggtggtcgaacaacctaaagatgtgatgtcgatggaacggatgaacgattatcacggtctctatcacgtcttgcacggggtgttgtcaccaattgaaggtaaagggccagacgatattaatattgctaatttaattaaacgactccaaaaaacaccagctaaagaagtcatcatcgccaccaatgcaacgccagaaggggaagcaacggcgatgtatatttcacggctaattaagccggccgggattaaagtcactcgcttagcccatggtttagcggtcgggagcgatattgaatatgcggatgagatgactttattaaaagctgtcgagggtcgtcaagaaatctagaaatggtggggttataatgttcggtagacgaaaaccaacgctaagagaagctggcgatgaagcgttacttgatttgatttatcaagtgaaagataagtggcgctcagcacaaaaaacgcaagcaaacgttagaggactagatcaaacgttggagatggaaagtaagattcaacaagcaaagttcgaatttttataccgacaagcacgtcagcgcaaggtggccagtgatgccgtttcgcgtgaagtagccagccgtaatgctttaagataaccaaaaaaagattggacccttgataaaagtgattttatcgggggaccaatctttttattagcgaacttttaaccccttccctttaccttgtttgctcaatcaagtaaaataagagtaactctattgatgaagaaggttgttgtgtggtaggcaaattaattacgtttgaaggaccagatggtgccggtaagaccagtgcactcgaagcagtcgtggcacgcttacaaaaagaagtgtcccaagaaattgtcgtgacacgtgaaccaggtggcaatccaatctctgaacagattcgccagattatcctggatgtgaagaatacggcgatggatgatcgaacagaagcattattatacgcagcagctagaagacaacatattgttgaaaagattcaaccggcacttgcaaccgataaactcgtgatctgtgatcggtttgtggatagttcaattgcttatcaaggtgctgggcgcgggattggggaagaggcagtggcgcaaatgaatttatttgctactgacggcctcacgccagatttaacgttatacttagatgtgccttctgaagtcgggttagcccggattaagcagcatcgtcaaaatcaatatgaccgcttggatcaggaaaaattagcattccatcaaaaagtgcgtcaatcttatttgaaactagcacaggcgcacccagatcggattaaaacaattgatgcctcacaaccccttgaagcggttgtgacacaatgtttacaagtcatcgcacaagcaaatccgcatttatttgaagtataaggggagagattaagatgaaattattattagcaatcgtccaagacaaagacagtaacttattaagtagtgaattaattgatgccaacattcgagcaacgaagttatcaacaactgggggctttttgaaatctggcaatacaacgtttatcgtggggattgaagacgaacgggtcccagaagcattgaagattattgaagaaacgtgccaagcacgcgaacaattcatgacacctcctatcaatatggatgccacaatggacagttcaatgtcttaccctattgaagtacaagtcggtggggcaaccgtctttgtgatgccaatcgaacaattccaccgcttctaaacaatggccactttaacaattgaacaaatgcaacccaagcttgtccagcagtttgcccagattattgcgcgtgggcagttagcacatggttatttattagccggtgcacaaggtgtgggtaagatgcaattggcacaatggttagcactgcgtcttttttgccaacaggtcaatgaagacagtcaaccttgctatcaatgtcctgaatgccagcggattttaactgggaatcatcccgatgtcgtcgaaattaaaccagacggtaagagcattaaaattgctgatattcgctatctgaagcaagaagttgccaagagtgggatggaatcgagtcagcggcttttcattattgaagcggcagagacattgacggctagtgcggccaacagtttattgaaatttttggaagaaccggcgccaaacgtctacgcaattttatgtaccagcaataagaatctgatgttaccgacgattttatcgcggcttcaagtgattgacttagccaatctgccgaaggaaatggtgcgtcaacaatttgaagaagcgcagattttaccagcgcaggcacagctgttgagtcacttgacgagtgacttaacgcaggcccaacaattattggccgaagactggctgatgcaagtcgttgctaaaatcacgagttgggcccaaaaagttgcccaaaaggatttggagagttttgtaacgattcaaacgcaactactaccgttattgacagatcggtcccaacaaaagatcgccttaaacttaattggtttgtggtatcaagatcttttaaactgccggtatgatttggcgggtgatctttgttttagtgagtatcgcacacagttaaacaccattagtcaacaaatgaccgcagcggagattgtggcgcaaacagaattcgttttaacggcccaacgcacgtttgaacaaaatgtgagttgccaaaacgtcttagagagtttaacgttaaatttaatcgcagtagcatagcggatcgtagttcaaaaattagcttaaaaggccatcgggaggatgtaaacgttgagtaaaacagacttatacgaacaattattaactattgagcagcaggccaagttaacgtttgacggcatcactgaaatgaaggcagttttatctaaagttctggaagaaaatgcagaattagagattgaaaataaacacctcagagaacaccttcaggaattacaacaaacaactgaggaaactgacactaaagatttatcacaaggtttgtctaagtctaaacaaaatttacagaatctgtatgaagaaggctttcatatctgtccttatttctatggttcgcgacgtgaaaacgacgaaccatgcgccttttgtaacgacgttatttatggcgaacggacagctgattaatcattaagcaacgcaaacagggcgctgaggcaagatcatttgtcgcggcgcccgcttttataagctcgagtcattacggcgtgaagggataattaaacatgcaaacacaatctagttttaaaacaaccactcaagggacgctctatttggtgccaacaccaatcggtaacttgggtgatatgacgtaccgcgcgattgagacgttaaaggacgttcagttaattgcggctgaagatacacgcaatacgcaaaaattattgaaccactttgaaattgaaaccaaacaaattagtttccacgaacataatacgcaacaacggattgaaacgttgattgaaaaattggaagcaggcgacgatattgcccaagttagtgatgcggggatgccatcgattagcgatccgggtcatgaattggtcaaagcttgtatcgaagccaatatcgcagtcgtaccactaccaggcgcaaatgctgggattacggcgttaattgcttccgggattacaccgcaaccctttacgttctttggctttttaccacgcaaaggcaaagagttaacggaaacggtcgcacaactagccttaaagccggaaacaaccatcttttacgaagcacctcatcgtttgaaaaagacgttacaagcgttgatcaacggttttggtggcgagcgccaagttactttgggccgagagttgacgaagaagtttgaagaatttattcgcggtgatttacaagaagccttaacttgggcaactgataatgaaatgcgcggtgaatttgtgattatcgtagcgggcaacccaacacctcaaaacctaagtgtggtggccactgacccgactttatcactatcagaacaagtcgaagcccagattcaacaaggggctagtcctaatgttgccattaaaacggtcgctaaggccaatgatttgaagaaacaagtggtctacaacgcgtaccacgatttaacagaatagaggaaataagatggcaggcaagcagtatacagaggaataccggattccgtattttgaaacggatattaaaggcgaattgactttggcatcattggtcaacgttttaattttggcctcagaacaccaactcaatgacctcaatgtcggcgaagaaacaatgcacagtttaaatcttggatgggttgtcacgcaatatcaaatgacgattaaccggatgcccaaagtggatgaaaaggcgcggattgtgacggaagcagagagttataatcgctatttctgttatcggaatttttggttgtatgatgaagcgggcaacgagtgcgtctttgtccagagtatttttgtgatgatgtcttatgaaacgcgcagtatggtgcccgttgtccccgaaatcatggcaccgtttgaatcaatggcaatcaaaggtagcaaacgattcccacgtattaagaagatagactcagaaaaggcatcgcaaaaagaataccgcgtgcgttattttgatattgatggcaatcaacacgtcaataacgtccattattttgaatggatgttagacgccttggattatgatttcttgatggatcatcgggtgacaagtgttaatatccgttatggtcatgaaattcaatacggccaaatgacacaaagccaggtcgaacaagtgatggtggatgacataatgacgacacgccacaaggtagccgtggatgacctcagcgcagcagaagccgaaatagcatggactaaaagataagcgtattgctaaaagtacgtttcagatacaaaaaaagggagctgggacaaaagtaattttgtcccagcccccttttttgttatccaaatattgatggtctaaacgtgttctataagtcatatccttccggttaaccctgaatctcaagcgattgcttgcagcaatcattcgccattctgtgttaatcctcgggatatacccgacttatgatacacactcttttttaaacgtgttctataagtcatatccttccggttaaccttgaatgtcaaacgattgcttacagcaatcattcgccattctgtgttaatcctcgggatatcccgacttatggcacactccttttttagttagttttcttatgaaacggcattgctgacgaagttcacgaggtcagcgcctgttttaccagcacttaagccaacttgaagtttcaagcgggctttgggaccgtttaagccctggcagaaagtaatgcccatttttttcaatttaacgccaccaccatcgtagtcgtagacgtcttcggcaataccgttgaaacagcgtgatacgagcacaacgggaatattgcggtccagtaaggcttggatggcaggtagtgttgcgggtggtaaattcccagcaccaagagcttcgatcacaaggcctttagtagttggctgattgatggcttcaaaaagcgtcccgtccatgccggcataagcttttaataagaagaccggttcaaccaattcttggatatcgcagatttcagaacgaattaattcttggaagaaattagcatcgtgcttgctgaccaaaccaattgggccaaaagttggtgttctaaaagtagcgacatttgtcgtgtgcgtttttgtcacataacgagcggtgtggatttcatcgttcatgacgactaaaacacccttatcgtgggcatcgtcagaagcggcggtccaaacggcactaattaagttatgaagaccatctgagccgatttcattagaagaacgcatcgcaccggtgataacaattggcacgttgttaggcaaggtcaggtctaagaagtaggcagtttcttcaagtgtatcggtcccgtgagtgatgacgaccccatcgataccagttgcttcagctgcttgaatgcgattcttgagtgctaacatcacggttggtgtaatgtgtggtgagggcagattcgcaaattcttcactaataattgtgagttggttatcgaataatttttcaaaaccggccattggattttgaccagttggtgcgactgcaccgtcttgatcagcggacatggcgattgtaccgccagtgtgcaagacgaggatttttttcatagttgtcagtccctttcataatcaagcttaattaattccagtatagcaaattttaaccacattgagatgatatattttgaagtggacaaactgaatagttgtatcctcagggaatcggtggtacatttagtaagttctaaaaagattcggagtagggattaaagcgttaagtgctggtggaacggaatgtgaacaccagacgaagagcagtaatgctcgcggttttagtcccgcattcgccgcagtgttatttgtggcaactccaaaagggagatgctttttttatggttaatcaagatcggttatttggtgtgaagctagacaccagacgcgttgtattactagctgttctaatcgctttacaattagtgattgcgcgctttgcgatttcgctaacgatttacagaattagttttggttttatcgtcaccgctttaatgggctggtggtttgggccagtttgggcgggcttagcggccgtccttggcgatctcatcaatagtttgatgattggtgtcccgggcggttatttccccggattcacgttatcagccttcttaggtgcattcatttacggctgtttcttctaccggcaaaagattacgtggttacgcgtgattttagcggtattaacggtggttgttgtcgttaatctcggcctaaattcatggtgggtatcaattttaagtcagaccccaatcagtgtccactttgctacaagggcagtgggcgaggccgccacaatggtcattcatccgattgtgatttacctcgtgatgcattttgaaccaattgttcgtttgaaagacagaattcaataattttaaaaacaacgaccactttgataaagttattctttatcaaggtggtttttttagtgcaactaaaagtgacgcgtgtcgatttaatcgctaatttatgctagaataacaaggattataagcagaagaaggatgacattaatgaagctattggcaatggatacctcgaatcaagcggtgagtgtggcgctacttgaagaccaacaaatattaggcgaaatgaccgtcaatattcggcaaacccacagtcaaacattgttaccaatgattgatcaacttttaaaacaaactaagacatcgattgaagcaatcgaccggtttgtagtcgcacaagggcccggttcatatactggcttgcggattgcggtcacaacggccaagtcttttgcctggacaatggccaaggaattagtcgggatttccagtttggcgctcttagcggggaacgttcaagaaacaaccgctttgattgtgccgctatttgatgcgcgccgggacaacgtttttgccggtgtttatcaatggcaagaccagcacttacaaaacgtggttgctgatcaatatttggcactaaccgacttattagcacaagtggcgttattaaatgaacctgtctattttgttggcggtgacgtacaacagtttaacgcacagattaaagccactttgggtagtcaggcccattttgtcgatgccaaccataacttgccacacgcagctgttctaggccaattgggggctaatgctgaaccagttgctgacatccatggctttgggccacattatctcagaaagacagaagcagaggtcaactggggtaagacacatgacgatcaaggatcggcagcttatgtggaacaagtttagggaatacctacgcccacgtgtttggttaaaaaaagagctcccctacgttacgcggcaagtcatgattgatgatcagccgttttacttggcgcgtgctagccagagcgatattccagcgttgattgatattgaacgctcggtctatggcggtaaaacaccctgggatcggtgggcctttgctagtgaactcagcaagcgccggacatcgatttatttagtattgtgccaaggctcagaagtggtcgcgtttgttggcgcctggttttcgactaatgaggcccacatcacgaatattgcggtccgtcccagctttcaaaaaagggggattggccactttttagtccacgaagtggttgcacttgcgcgggattatccaagccaaaaaattacccttgaggtccgcactggtaacaccggcgcccaatctgtttatcgacgaatggggtttaaggttgttaaaaccagacgtaattattatgttcaggaaaaagaagatgcattcagtatgtgccgcatactgagtcaataggagtaacaaaatgacggagaaaaaagaattaattttagcctttgaatcaagttgtgatgaaacgagtgtggcggtcattgaaaatggccaacgcatcttaagtaatgtcatcgcaacgcagattaagagtcaccaacgttttggcggggtagtcccagaagtcgctagtcgccatcatgttgaacaaatcacactttgtacacaagaagcactggaacaagctggtgtgacttatgatgatttaacagcggtcgccgtcacttacggtcctggactagtcggtgctttgttgattggggtcacagcggccaaagcaatcgcctacgcacatcatttgccacttgtaccggttaatcatatggccgggcacatttatgcggcccgctttgttaaaccgttagaataccctttgttagccctattggtttcaggtggtcacacagaattagtttatatgcccgctgcgggtcaattcgaaatcatcggtgatacacgggatgatgcggctggcgaagcctacgataagattgggcgggtattgggtgtgccatatccagctggtaaggaaattgaccgcctcgcacatttaggccaagatacgtttaattttccacgcgcaatgttgaaagaagataacttggatttcagtttcagtggtctcaagagtgcttttatcaatacggtccaccatgctgatcaaattggtgaaacattggatcaagcggacttagcggcgagcttccaaacaagtgttgttgaagtattagtcactaaaacccttcgtgcagcacaatcactaaaggttaaacaattggttgttgccggcggggttgcggccaaccaaggcttgcgagaaggcttagcggctgggattgaatcagcaggattagatcttgatttaatcatgccaccactacgcttatgtggcgataacggcgcgatgattggcgctgctgcccacattgcacttgcgcaaaatacgctggccgatttagatttaaacgccgtccctagtttggactttccatatcaaaacgaactttaaaagtaaaaaagagagtgtgctataagtcgggtatgtcctgaggattaacacagaatggcgaatgattgctgcaagcaatcatttgagattcagagttaaccggagggatatgacttatagaacacatttaaaaaagagagtgtgctataagtcgggtatgttctgaggattaacacagaatggcgaatgattgctgtaagcaatcgtttgagattcagggttaaccggaaggatatgacttatagaacacgtttagaccatcaatatttggataacaaaaaagggggctgggacaaaatttacttttgtctcagcccccttttgtcaggcttcactttgatgtagtcgcgcaccttggctttggtgctgctcacggcgtgcttgatgatgttgacggtatttttctaagcctaagacgatgccagtagcaataataccaacccaaaagagattaggcggtaagaataaaataaccataatcaatccagctaccagtggggcttcaagaatggcactgcccatactgatggcaattaacccaatgacaaagagggaatcaacttgcggaaataactggctgattgccatcccttgagcggttgaagcaaacaataccgggaagatatccccaccaagccaaccggtgttcaaacagattgttaataaaattagttttaatagggagcggctcattaaaaaaagcattgattgatcttgccaaatcgtggtgaataaatgaaagttatgttgaccggaaaagagaatgtgtggaaaaaagaggctggctaagaaaatcgccagaccaccgattaagacgcggacctgatcgttggtgaggcgggcttgcataattttgcgtaagcccaccatgccggccaaccaaagttttccgagtaaataacctccgagcactaatggtaaaaaccaatagagatcgcgcccttgccagtgtgattggccaagccgaataattaatgacggttgaccagttaagatgaagacaccgctaagccatgcggtcccgtttaaaaaataagtgacaatgagggctttcttttgataggttgctactttggtaagtgaggtggttggttgttgataatgcaatagatagcggtgcggtgtcgcgagtacttttaatctcgtgcctattgattgtacacataagtcatcaaaatgcgcggcgacgtagcgttgcttatcagcaagccaaacactatagaggaaggttgagctaaccaacgttgcttcagggcccagacttgttccactgactaaaataacagctggaatcagcatttgtaagaggacatagcgataattagcagtgcccgcttgtttgagatcagccttaatgacccccaaattttgtgggaggggcccaaaatagtgtcgtgaaataataatgactaggcccaccaccaccagcataatggcgtctaagaggccaccaaaggttgctttttgccagaaaatttcaattagggtactttgcaagctgtaaaaaaggccgagcaagataccgacgatggcgctcagaataaggccgtaactgaatagataaagtgatttaaatttaaacatgatacctccgaaaaaaagtgtctaaaagccatttaaccatagttgacaggaaaagtcaggttaaaaaaatcaatataaaataacactagttattagttaatttattaacaaatagtcagtaaaggggaatcagcaattatttaaattaaaaaataacattaattgacaattatttagaaagcgcttatactgaatttacagcagtgatgaaaacgcttcatttcactttctatacaattttttcatttcaatctaaaaaaattaaggggtaattactatggcagaaaaaacaatcatgttatgttgtgcggcaggtatgtcaaccagcttgctcgtttcaaaaatgcaaaaggcagcagaagcacaaggtgtcgatgcagaaatcttcgcaactggcgcatcagatgcagataaccaattagaaaacaaaaaaattgattgcgtcttattaggccctcaagtacgctttatggaaggtcaatttaaagaaaaattggcacctaaaggcattggtgttgaagtgatcgatatgaaagcctacgggatgatggatggcgaaaccgtcttgaaacaagcgttagcactaatcggttaatgatttaaaacaaagcccacctaagtaattaggcgggctttttgattagggttagacaagtctgtataatcggagaaaagagtagaggaggagaagctaatgagtcttttaggcacaattatttggtggattttcggtggcttagtgagtgcagttggttggtttttagccggcttagtgtggtgtgtcacaatcgtggggattccagttggcttacaatgtttcaaaattggtggtctgacgttaatgccatttaatgcacgagttgtttcgagcggtggtgcgggctcctttttattaaatattgtctggtttatctttggaggcttcattttatgggctaaccatattttctggggcttgttattaacaattacaattgtcggcatcccatttgcccatcaacattttaaattagcaagcttatcattgagcccatttggcaaacaaattgttggctagaaaaagcgcgtatcgtaggatacgcgctttttctggtttttaattagtcaattcttcgagtgccatcgcttgttcttcccaatcagcttctgtttgggcaaggtctgcttgcactttttctaaatcttgttgtaattcctgcaagaccaatggtttagtgatgatatcggcttgcgtcattttttcttgaatggcagttgcttgttcttcgagtgttgccatttgttcttctaaagcagcgacttcccgttctaacttccgttgtgcccgttgtgtttccttgctggctttataattatcttgagcagtaacaggttgatcactgacttcaactggcacttcagcggcttgtgcgaaggcttcttcctcagcttttttagcgagatagtagtcgtaatcgcctaagtagcgcttgctgccagtggtggttgacagttcaatgatgccggttgccacttggttgataaaataccggtcatgggagatgaagaggacggtaccatcgaattcgcgtaaggcttgttctaaaacttccttactatcgatgtctaaatggttagtcggttcatccatgatcaagaaattatcatggttcatggctaatttagtcagtagtagtcgtgctttttcgccaccacttaattgtgagacgactttcaaaacatcgtcgccggtgaataagaagctacccaaaagcgtgcggatttctttttcaggggtggtgcgatgttcatcccataattcattaagaacagttttgttagcgtggaggttgcgttgttcttggtcataataaccgatagaaacattgctaccaacacgttcgtgaccttttaagaatggaatttgatgaaggatactctttaaaagtgttgatttaccaatcccattaggtccgataatcgctaagcgttcttgcttgttgacttcaaagttaatgggttcgaccattactttgtcggctgagtaaccaacagctgcgtcaacgacttgcaagactttgttaccacttggttgatcgatatcaaaatggaagtggattttagaggcgtcgttggttgggcgttctaacttatccatcttttcaagttgacgacggcggctttgggcttgcttagtcgtgctggctcgaactaagtttttgtcgacgaatgtttggagtttctcgatttcggattgttgtttctcataagccttccattcgagtgataggttggctgatttttgcgtcaagaagtgactgtaattgccggtgtagtgcgttaatgtgtggcgactcatatcgtaaacttctttagtaatcttgtctaagaagtagcggtcatgagaaacggttaaaagtgcgccgggataggtttgaagataattttcaagccatgttaaggtttgaatgtccaaatggttagttggttcatccaagattaagacgtcttttttctcaagtaatagcttagcaagtgctaagcgggaccgttcgccaccagatagcgtgctgattggtttggtgaaagtttcttctgggaattggaaaccgtgcaatacaccacgaatttcggcttcgtaaccatacccgtttgcttcagaaaagtcgtgttgaatctgatcgtattgttttaagagggcttggtagtcctcatctgaacgattagcatctggatcggcaattgcttgttccaacgtatgcatctgagcttccatttggcgaaggccttcgaaaatcgttagcatttcgtcatagatgttccgttcagaactaagaccgctatcttgggctaagtagccaacttggacatttttacccagaataatttgaccatcatcgggcgtcgtaatgccagcaatcatcttcaaaagtgttgatttaccagcaccgttagggccaactaaggcgacgcgggcgtgatcttgcacttccaattgtgcatttttaaataagtagtcaccgccaaagtgacgggcgacttgttgaacctgtaataatatcacaatgtaaaatcctttcgatgtcgtgtttttaaggtaccattttaaggaatcgttaaagtccgtttcaactatcataacagatttagggcaaagacagtcaaaatagtaaattaattgcttttcacaagaaaattcagtatcatttcaatatagtgtagggatattttcacaagtaaaagaatgaacggaggttccaaatggctgaaaataaaattccaagagccacagcgaagcgtttacctttatattatcgttatctaaactttttaaacaattcgggtaagaccaaggtttcgtcaactgaactatctgaagctgttaaagtcgatagtgcgacaattcgccgtgatttttcatatttcggtgcgctcggtaaacggggttatggctatgatgttgagtctctcttgagtttcttcaagaagacgttgaatcaagatcgcttaacgaatgttgctttgatcggtatcggtaatttaggacatgctttgttaaattacaactttagacaaacgaataatattcggattagcgctgcttttgatgttaaacctgaattaattggcacaatccaaacaggtgtgccggtttactcaatggacgaaatggttgaacaattgaagttacaacaaattgaaatcgtcatcttgacggttccaatcgaagttgctcaaaaagtaacggatcaactagttgatgcagggattaagggcatcatgaactttaccccaattcgaatttctgtaccgaataccattcggattcaaaatgttgatttagcgaaagagttacaaacgttaatttatttccttgataattataatacagaagaagcgtcaaaataaatagagcctcattaaccagcagtaatgtcggttgatgggctctatttttttaatgactgagataaaagagcgttacgacgagattcattcccgcatgactgataatcgttgtataaatggaacccgttttgcgatacagccaacaaaggaaaaggccgattgccgcgtagataattagatgactgtcttgatgaatcacggcaaataataaactagagatgagtgcggctaataccgaatttaagcggccactaagaccgccaaaaatcgcctttcgaaaaacgagttcttccattgttggcgcagcaatcgttagaataatgatcaaccacggttgggctttgagggccgtcatgagagtgagcgtattgagtgattgcgtactatttttaaagagtagatgatcaattgaaccagcgataatttggacgattaacgcgagtaaaataccactaatgccccagatgatgactttcttaagcggcaaggggtgtttctcaagactactttttgggcctcgataattaaaatagagtaataaaagtgcgccgaggctatccgtgattgtggtgaataaatagaattgatctgacaacccgaaaaagcgaacgagggcactagggattaataaaatgatgagatagctgataatcagcctaaaattttgttggctttgagtcatgattacgctcctgaaagttgatgtgaccatagcgtagcgcattggcgattaaaatgcaaaagggggtagcaaaatacttgcaatgttctgaaaaaatgctatgataaaaaatgtgattagcacttgagtgtttagagtgctaaaaaagaaaaagtgatggagggattttaagtgttaaaaccattagaagatcgcgtagtgatcgccgttaaagacgaagcagaacaaacagtaggtggcattgtcattgcaagtaacgccaaacaaaaaccacaaactggtaaagtcgttgccgttggtgccggcgcaatgaccagtgacggtcagcgaatcccacttgatgtcaaagaaaatgatgaagtcatttacgataaatatgctggttcagaagttgaatacgaaggccaacaatatttggtattacacgcaaaagacattatcgccattattgaataataaactgaaacgtttaaaaacaaactaaaaaatttttttgaggtgaaataactatggcaaaagaacttaaattttcagaagacgcacgttcaaaaatgttagcaggtgttgatcaattagctaacactgttaagacaacattaggaccaaaaggccgcaacgttgttttggaaaaagcttacggttcaccagaaatcactaacgatggtgtgacaatcgctaaagcaatcgaattagaagatcattttgaaaatatgggtgccaaattagtttctgaagttgcttcaaaaacgaacgacatcgccggtgacggtacaacaaccgctactgttttagcccaagccattattcgcgaagggatgaagaatgtgacagccggtgctaacccagttggtatccgtcgtgggattgaattagcgactaaagaagctgttaagaagttacacgaaatttcacacaaagttgaaagtaaagacgcgattgcccaagttgctgctgtttcatcagctaacgaagaaacgggtcgtttaattgctgatgctatggaaaaagtgggtaacgacggtgtcatcacagttgaagaatcaaaagggattgatactgaattaagcgttgttgaagggatgcaatttgatcgtggttacttgtcacaatacatggtgactgacaacgacaagatggaagctgacttagacaacccatacattttgattacagataagaagatttcaaatattcaagatgttttaccacttctacaatcaatcgtgcaagaaggtaaagctttattaatcatcgctgatgatgttgatggcgaagcattaccaacacttgtcttgaacaagattcgtgggacattcaacgtggttgctgttaaggcccctggttttggtgatcgtcgtaaggaacaattagaagacatcgcgacattaacaggtgccacagtgattacaagtgaccttggtctagaattgaaagaaacaacaatcgatcaattagggacagctggtaaggtaactgttacaaaagacgatacaacaatcgttgaaggtgctggtagcaaatcagctatcgcagaacgtgttgaaaacatcaagaaacaaattgctgaaacaacatcagactttgatcgtgaaaaattacaagaacgcttagctaaattagctggtggtgttgcagtgatcaaggttggtgctgccacagaaacagaattgaaagaacaaaaatatcggattgaagatgccttaaatgcaacgcgtgcagctgttgaagaaggctacgttgccggtggtgggacagcattaatcgatgtcatcgaaagtgttgccgctcttgaagaagaaggcgacgttcaaacagggattaacattgtgcttcgtgcattagaagaacctgttcgtcaaatcgcaacaaacgctggtcttgaaggctcagtcattgttgaaaaagtaaaatcacaacctgttgaagttggctacaatgcagcaaacggcaactgggaaaatatgattgaagcgggtatcttagatccaactaaggtaacacgctcagcattacaaaacgcagctagtgttgctgctctaatgttaacaactgaagcagtggttgctgacaaaccagaagacaacccagcaccagcagcaggcatggacccatcagcaatgggcggcatgatgtaattaaaatgagtgtgttcaaaccgggatgttctgaggattagcctaacaaggcggatcattgcgcagcaatcgtttgatttgtgtagctaaccgcaggaacatggtttgaaaaacacgttaaagcagtacgttcaaccaaggccatccccagcattttactggggatggccttttttactgttgttttcaaaattaacgctggttattatcattttttagcttataatgaatgcaaggcgcccgtcgaaatagattttatttagctaatcgacgctataactaacggtcaatgatggttagaatagataggtacctaagttaaattcttgtagtattttagtgtcagatatagtagaataccttttgttcgaaaaaacagcaattatttttaagtaggatattatattcaaaagtcaccgtgtgaaatggtaacaggcgattatcacatgagggctttttatgtatagaaatacgattaattaaaggagttatattgcaatgcaacaactaaaacggattttcatcgggaaaccattaaagtcttccgatgaaggtaaccagaaattagggcgcttcaaggccctggcaatgttgtcttctgatgctttgtcatcagttgcatacgggaccgaagaaatcgttgttgttttaacaacgctttctgcagcagcaatttggtattcaattccaattgcagcgttcgtattggtgttattgatttctttaaccctttcttatcggcaagttatccacgcctatccaggtggtggtggcgcctatgtcgtttcaagtgaaaacttgggtaagaatgcgggtttagtcgcaggtggttcactgcttgtggattacatgttaacagttgcggttagtatttcggctggtgctgaggcgattacctcggcaattccggcaatgtacgggcaccaggtagggatttcctttgtcatcgtgattattttaatggcgatgaacctccgtgggatgcgcgaatcagcgtcgttcttaatggtgccagtttacttattcgtcttgatgatgaccttgatgattatcgtcggatgttacaaaattttcacaggtgcgattccattccacgcaacagcaacagttggggccgttgtaccagggatttcaatggcattgatctttagagctttctcatctggttcatcttcattaaccggggttgaagcaatcagtaatgcggtaccgttcttcaagaaaccacgggccacaaatgctgctgaaacattggcaatcatggccgctatcttagggttcttctttgccggcatcacattcttgaactactggtacggcattgtgccaatggaaaaagtaacggtcttatcacaagttgcacaacatacttttggtaaagggttcttcttctatatcgttcaattcgcaacggccttcattttagccgttgccgctaatactggtttctcagcattcccagtgttggcttataacttagcaaaagataaatatatgccacatatgtatatggatcgtggcgatcgtttgggttactcaaacgggattatcacattggcaatcggttcaatggcgttgatcttcatctttaacggtgacacatcacgtttgattccgttatacgccgttggggtgttcattccatttacgctttctcaatcagggatgttgcgtaagtggtgggttgaacggcctaagaattggtttggcaaatcaatcgctaactttgttggtgccttgatttcatttgccattttaatcatcttattcgtttatcgtttacctgatatctggccattcttcatcatcatgccaattatgatctggattttctataagattcatgatcactataagaaggttgcacgtcaattacgagtaagtgccaacgaagctgtcttacatgattatgatggttcaaccgtcatcgtcttggtcagcaacgtgactcaagttacccgcggggcgcttgattatgcacaatcaatcggtgattacgtcattgcgatgcacgtgtcgacagatgaaaatccggaaaaagaacgtgaaattcaagctgaatttaaggctgatttcccgaacgtccgctttgtcgatgtgcattcatcataccgttcaattcaaaaaccaattgttcgttttgtggatattgttagcaagaatgcccaaaaacgaaacttcacgacaacggtcttggtaccacaatttgtgccaagaaaaccatggcaaaacattttgcataaccaatcaagtttacgcttaagaacagcttttgccagccgtgaaaacatcattatctcaacatacagttaccacttgaaacactagaagtgcttttggttgtggttagcaactgagcattaacaaaaaaacttgccctagactgttttagtttagtgcaagtttttttgtttcattaagcaccggccagaactttttattcatggtaaaaattgctacaatagaagctattaaagttagtacacaacattaaggggcgcgacatgcgaatattatttattggtgacacagttggcacaatgggacaaaaaatggtgaacgagtatttaccacttttgaaacaacaatataaaccacaggttaccattatcaatggtgaaaacatcgctgatggcaagggaatgacacaaaaggattacaagaacttattgcaagccggtgcggatgccattacgatgggcaatcatacttggaataaacgggatattttggacttcattgatgatgccaaaaagttagtgcgacccgctaattttcctaagggaacgccaggtcaaggtatgacgatgattaacgtcaatcaggctaaattagccgttattaacttacaaggtcgtgcattgatgggcgaattgttagaagacccatttgcaatgttagatgacatggtggcccaagtcagcaaggaaaccaattgtatttttgtcgattttcatgccgaaacaacgagtgaaaaattggccttagcttggtatttagatggtcggatttcagcgttagttggaacgcatacgcatgtgcaaacaaatgatgcacgtgttttaccagacggaacggcagtgttgacagatgccgggatgacaggtccttataacgggattcttggtgtgaaacgcgaaaaaatcatttcacggtttatgacgcaacgcccagaacgatttgaactagtgacagaaggtcctggccaattgaatggctgtttaattgaaattggtgatcaaacaggtcatgccaaatcaatcaaacccatccatatttcaccagatcatccattcggatcacgcttttaagagatagaaaggggcttgaaaatgccgcaaaaaacaaaagaaacgccaatgatggcccaatatcaaaaggttaaggatcaatatccagacgcctttttattttatagattgggtgatttttacgaattattcaatgacgatgctgttaaagcatcacaacttttagaattaacgctgacagcgcgtaataagaatgcagcagaccccattccgatgtgtggtgtgccccatcatgcagcgcaaaactacattgatattttagtggatcaaggttacaaggtcgccatttgtgaacagatggaagatcctaaaacggctaagggcatggtcaaacgcgaagtcgttcaattagtaacacctgggactgtgatggacgaaaaagccggtcacgctaaacaaaataattatttaacggcagtcgttgcacagggcgatcaatttggcttcgcctatacagatttatccacaggtgaaatgaaggttagccaaatcagtagtttagatgtgttattaaacgaaatgttgagtttacaaaccaaagaagtggttgtgaatcatgatgtcccaagcgaagtcgttcaagcctttgtccaacaacaaatcttggtttcttatcaagatgagggggccgatacggcagaggtcagttttgtttctcaaaacatctcacaaccactagcgttagccgtcattaaacaattagttgtttatttagcaacgacgcaaaagcggcacttgggtcatttacaacgcgcccaagcctatgaaccttctcaatacttgaagttggatcattcggctaagatgaacctcgaattgacggcttcattacgaactggtcataagagcgggacgttattgtggctactggatgaaacaaagactgcgatgggtggtcgcttattaaaacaatggttggaacgaccattgttggatttaaaccagattaagaaccggcaaaaccaagtcgctagtttcttacagcattactttgaacggacgaaccttcaagaagccctaactaaagtttatgatttggaacgtctagcaggccgcgttgcttttgggagcgttaatgggcgcgatttgattcaattaaaaacatccttagaacagattccaaagattaaagatgttttgacgggcattaacgaaacgcaggcttttgatcaagcgttaacgcgtttggatccagttgatgatgtgcggacgttaattgaaacagcgattaacccggattcaccgatttcagtgactgatggtgggattattcaagatggttacgacgaacaacttgatcaataccgcaatgcgatgtctaacggcaagcagtggttggcgcaattagaggcgcaagaacgagaagctacgggcattcataatttgaaaatcggctttaaccgcgtctttgggtattatatcgaagtcacgcgggctaacttgagttcattaccggaagggcggtatgaacgcaaacaaacgttaaccaacgccgaacgattcatcacaccggaattaaaagaaaaagaacaactgattttagaggcggaagaacgctcaaccgctctagaatacgaattgtttacccaagttcgggaacaagtgaagttacaaattgaacggctccaaacattggctaaaggcgtagcggccctagatgtcttgcaaagttttgcggtcgtcagcgaaagctaccactatgtccaaccaacattaagaactgatagtcgcgaaattgatttagtcgatggccgtcatccggtggttgaaaaggtattgggacgccaaaaatatatccccaatgctgttcaaatgggcaaagaaacggatatgttattaattaccggacctaatatgtctggtaaaagtacctacatgcggcaattggccttaacggtcatcatggcgcaaatgggttgttttgtacctgccaagtcagcgaacttgcctgtatttgaccaaatctttacccgcattggtgcggcagatgatttgatttcaggacaaagtacgtttatggtagaaatgatggaagccaaccgtgcgattatgagtgcgaccgccaatagtttaattctcttcgatgaaattggtcggggaacggccacttatgatgggatggccttggcgcaagcgattatcgaatatatccatgatcacgtccacgccaagacgctcttttcaacgcattatcatgaactgacggctttagccgatatgttgaccgcccttcgtaacgtgcatgttggtgcagttgaggaaaacggcgagttggtcttcttacacaagatgttggccggacctgcggataagtcttacgggattcatgtcgctaaactagcgggcatgccagaaaccttattacaacgggccgatgttattttaggtcaattagaagataaaccaaaagcaccggtgcaaccagcaacagtcgtaccagcacaaccggctgcagcggctgtcgaagaacagatggcgctttttgaaccagaagtggcggccccggtcgataagaaaacagataaagtggtagcggcaattaagaattttgatttgatgagcgccacaccactagaagccctcaatcaattatatgagtggcaaaagcaattaaataaacattaatagtgaactgagaggattagatgatggggaaaattcatgaactgtcggaaattctgagtaatcaaattgcggcgggggaagtgattgaacgccccgcctcagtggtcaaggaattggttgaaaacgcgattgatgctaatagtacgcaagtcgatattgttgttgaacaggccggtttacagatgattcaagtgatcgataacggtgacgggattgaaccagaagatgtgccagtcgcctttaagcggcatgccaccagtaagattgcgactcggcaagatttgttcaagattcaatcgctagggtttcggggtgaagcgttagctagtatcgcgtccgtttccgatttaacgattgaaacggcaactgcggactctctaggaacctttgctcattttaagggtggtctgttagaggaacaaaaaacaaatccgattcgaccggggacggcgattacggtgcgggatttattctttaatacaccggcacgattgaagtacgtgaagacttttcaaaccgaattggcgaatatcgtcgatatcgtcaatcggctagcaatgagtcatccacagattgcctttacgctaaccaatgatgaccatctacttttaaaaacggccggcaacaatgatttaaaacaaacgattgccggtatttatggcgtcaccatggccaagaaactcttagccgtgagtgcttcggatttagattttaaactaacgggctacgtgtcattgccggaattaacgcgggcaacgcgcaattatttgtcgattttaattaatggtcggtttattaaaaattaccaattgaataaggccattatcaagggctacggttctaaattgatggtcggacgctatccaatcgccgtcttagcgattgagatggatccgctattgatcgatgtcaacgtgcatccaacaaaacaggaagtccgcttaagcaaagaaactgccttgatgaccttgattgaaggggcaatcaaagaaagactggcaaccgagaatttaattccagatgccatgcagaatttgaaacggaccaagacggtagatgttgatcagctccagatgaatttaaaccaaattacacaagaacgacggcacccaagcggtacggtgcgaccagtcagtccaatgccaatcccaacggtcaaaccggcgatacccgaaattgcggaaactgaaacgccgttagccgcaccaactgctaaagcgccggcgatgacaccggagcggcccttatttgagcaaccccaggcattggccgagtgggatcagaagtacgcgacagaggcggttgggaagccgtttggtgatcaagtggtagacgaaacggacgaaagcgatgaaaccgtagtcgaacccactgttcgtttcccagagttacgctacattgggcaactgcatagtactttcttattagcggaaggcgaagatggcttttatatcttggatcaacacgctgcgcaagaacggattaagtacgagtattaccgagaaaaaattggggaagtcagcacctctgtgcaaaacttgttagtaccgcttgttttggaatatccgaatagtgatgcgctaaagattcaggaaaaaactgaactcttggcggcagtcggaattcaattagaaaatttcgggcagaatagttttgtggtccacagtcacccaacttggattgaacagggacaagaggaaatgacgattcgtgggatgattgacgatgttttaaaagacggtcgcattagcattgcccaattccgtgagaagacggcgattatgatgagctgtaagcaatcgattaaagcgcaccatcatttagatgatacccaggccaaagcgcttctggctgatctagcgaagactgagaatccgtttaattgtccccatgggcgcccggttttgattcactacacgcaaaaagatttggaaaagatgtttaaacggattcaagaaccacatcatagttgggagggcgaataatgtttattttagcatcgcaatcaccgcgcagacaggcactattaaagcgcgttgtaaatgactttgaggtacaaccagcacagattgatgaacatgaaacaccgctaacgacaccgggcgattatgtccaaactttagcgcaacgcaagggtgaagcagtcgcggttcgatatccaacggcgaccattctagcggcggatacggcgattagttttcaagggacgctttatggcaaacccaaggatcgccaagatgcctatgaaatgctgcgccagttaagtggtcagacacaccaagtttatactggattgtggctgatgaaagacggtctggtgcaacaaaaggttgtccaaaccgacgttacattttggcatttaagcaccgccgagattgaacagtatttagatcagaatgaatatgcggacaaagcaggtgcctatgggattcaaggcgcgggtgcgctattaattaataagattaatggtgacttttacaacgtggttggtttaccagtcagcaccgttgcaagaatgttgcagaattaagaggaaataaaaatggtgaatgtggcagttttttgtggggccagcagtggccgtcgcccggtttatacacaggccgccagcgatttaggccattggttagtcaaacgacaagatcaattaatttatggtgggagtcgggttggcttgatgggtacgattgccgataccgttttagaaaacggtggtcgggtagtcggtgtgatgcctgaatttttaaattaacgagaaccagcgcatgctggcttaagcgatttggtgatggttgacagtatggccgaacggaaatcaaaaatgattgaattagccgatgtcctcatcgctttacccggtggaccaggtacgttagaagaaatgagcgaagtgatttcgtgggcgcgaattggccagcaagatagcccctgcattttctacaacgtagcgggttattatgatttattacaacaattcttagcccacatggttgaagaaggctttttaacacaaggcgattttgaaaaatacttgtttaccgattctttaactgaaattgcgacgtttattgcgacttatcaaccaccaaaaatacgagaatattaatcattgggattaggaccgagtagggcgggactgatcccaattttggtgaacagatgagactaaaaatgacttgcataatgtccgaaacgtgcgattagtactagctttctgcgcttaacgacgaatgccaaataagcgattgaatcgcttattcgtcactctttgttaatgctcaaaagctaaacaagtactaatcgcactcttagccaaatcgctttgtatcacaccttaatttgaaacgtgttcttcaaaactggctgttgtgctttgcgccgcatcgcaaataatcgacggggtcgcttattcacgatactaagaaaatgctcgcagccaaatcgttttgaatcacactctgtatttatggtacaatttagcaagcaaatatatgttctcgtaaagtaggttagattatgtatgaatatttaaagggtttagtgacggcggttaatccgtattacgttgttttggaagtccaaggaattggctatcaattacaagttgccaacccatatcggtatacggaatcgatgagcgaagtggttcaaatttttgtccaccaagcggtacgcgatactgatattacgctttttggcttttacgacttagatgaaaaacaacttttccaaaaattaatcagtgtttccggaattggtcccaagagtgccttggcaattttggctaacagtgatcattctggcttaattcaggcgattatgaacgatgatattgggtacttaacgaagttcccaggcgttgggaagaagacggcccaacagattgccttagatcttaaaggtaagttaggtgatctagaacaaagcgcaacgttagtcggccaaacggcaattgatttaggcagccaaggcgattcacctgaattaagtgatgcactagcggccttgagtgcgcttggttattccgcacgggaagtcaaagcgattacgcctaagttaactgattttgcagcgcaaacaactgatcaatatctcagagaaggtttgcggttattgatgaagaaataaggaggactttaaatggcagatgagcgaattgtttcagccgaaaacgatgattttgctgaagcaagcattgaaaaaacattgcggccacaagtccttgcacaatatatcggtcaagatcgggttaaaaatgaattagcggtctatattgaagcggccaaaaaacgggaagagtccctcgatcacgttttactttatggcccaccaggtttggggaaaaccacgttagcgatggtgattgctaacgagttgcaagtccagattcgaacgacaagtggccccgcaatcgagcggcctggggatttagtggcgttattaaacgagttacaacccggggatgttttatttattgatgaaattcatcgcttacctaagatggttgaagaattactttattcagcgatggaagatttctacatcgatattgtggttggtcaagggcccaccgcacatcccgtccattttccattaccaccattcacattgattggtgcgacgacgcgggcgggcttattgtctgcgccattgcgagatcgtttcggaattgtggaacacatggcttactacacggaagctgatttgatggacattgtgcaacgctcagccggcgtctttaacatgtcgattgtgccagatggcgcgttagaaatcgcacgtcgctcgcgagggacgccgcggattgccaatcggttgttgaaacgaactcgagattacgcacaagtggctgaccaaaatacgattgatcaggcgattgctgatcacgcattaagtcagctgcaagttgatattcggggcttagacggtgtcgatcgcaaaatcctccagatgatgattgattattatcaaggcggaccagtcggtttaaaaaccattgccgccaatattggtgaagaaaacgaaacaattgaagaagtttacgagccttatttactgcaaattggctttttaaaacgaacgcaaagaggccggatggtaacgccggctggttatgcccatttaggcatgccttatccagaaaaatagaaagaggtaaccacatggtatccacagaagattttgattacaatttaccagaagaattaattgcacaaacaccaatgattgaaagagcagcatcacgtttattagtgatggatcacgaaactggtgctttagaagacaaggttttctacgatattattgacgaattaaaccctggcgatgcagttgtcatgaacaacacgcgtgttttaccagcacgtttatacggtgttaaacctgatactggtggtcatgaagaagtcttgttattaaacaatacgcatgacgatgaatgggaagttttaatgaagcctgctaaacgggctaaagtggggactgaagtggtctttggtgatggccaattaagagccattgtcactaaggaacttgaacatggcggtcggatgatcgaatttaaatacgacggcatcttcatgcaaattctagaagctttaggcgaaatgccattgccaccatacatcaaggaaaaattagatgatccagaaatgtatcaaacagtttatgctaaggaaccaggttcagccgctgcaccaacagccggtttccattggacagaagaacttttacaaaaggtgcaagataaaggcatcaaattggtttacttaacattgcacgttggtctagggactttccgccctgtttcagaagacaacgttgaagatcacaagatgcacagcgaattctatcgtttaacagaagaagctgctgcaacgttgaacgaagtcaaacaaaacggtggtcggattgtagcgactgggacaaccagcattcggacgttagaaacaatcgcaacgaagtttgatggcgaaatcaaagctgatagtggttggacagaaatcttcatcaaacctggttaccaatggaaagccgttgacgcttttatcacgaacttccatttaccaaaatcaaccttagtgatgttagtggcttcatttaccggccgcgaaaacatcttaaatgcttatcaacatgctgttgatgaacgttatcgtttctttagctttggcgatgccatgtttgttaaataaattatgtaatcgaggtgtgagcattgatgtatttaagaaaagccgttttttctgatttaccacgaatttcagcaattatcgatggtgctaaagccgcgttaaaagaacggggtgttaaccagtggcaagctggtgatcctagtgaaagtcagtttgaaaatgatattcgccaagaatattgttatatcttaattaaggatgatacgattgttggtgtcgcatcaattgtcgatacagttgatgacggctacagtgcaattactaatggtgactggcaatcggttgcttctagtcatccctattattcaattcaccggatggccttagatggttcagttcgcggccaacatttggcccatcagtttatgacgttattaattacggccgccagtattgacggcgcgcacgatgttagaatcgatacgcatcccgataatttagccatgcaacacgtcattcaaaaggcgggctttacttactgtggcgatatcttgattgctgatgatccgtcacctaaacgctttgcttaccaactcgttttaaaataaagtttgaaattaaattgtccaaacgaaactaagatactcaggtatcttagttttttttatgtttttaaagtaagcgttatcaattgatgcgataggattctggttataaaacgtgaaattgctaacattaaaagtgtaagaatccccctgaaagcgattaccatcgcgactatagtaggtcttgtaaacaaaggaggtagttttaaatgacaagtccaattcatgtaaattccgaaatcggaaaacttaagacggtcttactaaaacggccaggtaaagaagtcgaaaacattacacctgacattatgtatcgtttattgtttgatgatattccttatttaccaacaatccaaaaagaacacgatcaatttgcacaaacattacgtgacaatggtgttgaagtgctttacttagaaaacctcgctgccgaagcaatcgatgctggtgacgttaaggaagctttccttgataagatgttgaatgaatcacatatcaaatcaccacaagttcaagcagccttaaaagactacttaattagtatggcaacgttagacatggttgaaaaaatcatggctggggttcggaccaacgaaatcgatattaaatcaaaggcattgattgacgttagtgctgatggtgactatccattctatatggatccaatgcctaacctatacttcacacgcgatcctgccgcatcaatgggggatggcttaacaattaataaaatgacttttgaagctcgccaaagagaatcaatgttcatggaagtcatcatgcaacatcatcctcgttttgccaaccaaggcgcacaagtttggcgcgaccgcgatcacattgaccgcatggaaggcggcgacgaattaatcttgagcgataaagtgcttgcaattgggatttcacaacggacttccgcacaatcaattgaagaacttgccaaggtattatttgctaaccacagtggctttgaaaaaatcttagcaattaagattccacataatcatgccatgatgcatttagacacagtcttcaccatgattgattatgataagttcaccattcatccaggcatccaaggtgctggcggcatggttgacacttatatcttagaaccaggcaataacgacgaaatcaagattacacatcaaacagatcttgaaaaagttctccgcgatgctttggaagtgcctgaattaaccttaatcccatgtggtggtggcgatgcagttgttgcccctcgtgaacaatggaatgacggttctaacacattagcaatcgcacctggcgttgttgtcacttatgatcgcaactatgtttcaaacgaaaacttacgtcaatgcggcattaaagtgatcgaagtcccatcaagtgaattatcacgcggtcgtgggggtccacgttgtatgagtatgccacttgtaagagaagacttaaaaaaataaacaataaaaaacgaggttgatcaacatgacaaacagcgtatttcaaggcagaagtttattagcagaaaaagattttactaaatcagaactcgaatacttaatcgatttctcattacatttgaaggatttaaagaaaaaagggattccacatcactatctagaaggtaagaacattgccttactatttgaaaaaaattcaaccagaacgcgtgctgcttttacaacagctgccattgacttaggggctcacccagaattcttaggtaaaaatgatattcaacttggtaaaaaagaatcagttgaagatacagccaaagtattaggaagcatgtttgatggcattgaattccgtggctttagccaaaaagtggttgaagacttagctaaatactcaggtgttcctgtatggaatggtttaactgacgaatggcatccaacacaaatgattgctgattttatgacagttaaagaaaacttcggcaagttaaaaggtgtgacattaacttatgttggtgatggccgtaacaacatggctaacagcttgttagtaacaggttcaatgttaggcgtaaatatccacatcgttgccccagattcattacaaccaacacaagaagtccgtgatttagctgaaggttacgctaaagaaacaggcagcaagaacatgattacttcagacgttgacgctggtgttaaaggctcagatgttttatacacagacgtttgggtttcaatgggtgaagaagataagtttgaagaacgggttaacttgttgaaaccataccaaatcaacatggacatggttaagaagaccggtaacgaaaacatgattatcatgcactgtttaccagctttccatgatattgaaactgaatatggtaagaagattgacgaacaattcggtattcaagaaatggaaattactgacgaagcattcagaagcaaatatgcccgtcaatttgaagaagctgaaaacagaatgcactcaatcaaagcaattatggcagcaacattaggcaacttattcatacctcaagcataactagattgtagaaaggggctggaaaacaaaactttgttttgtcccggctccttttttaattgaaaccacaattaattaacagaaagtaggacatgattatgacaaaacgtaaaatcgtcgttgcattaggtggcaatgccattttatcaaccgatgcctcagcaagcgctcaaatcaaagccgttaaggaaacggttaaacaattagttgcattcgtaaaacaaggcgaccaactcattatttcgcatggtaatgggcctcaagtcggtaacttgttgattcaacaagctgctagcgattctgaaaagacaccagcaatgccattagatacggtcggtgcgatgtcacaaggcgaaattggttactggatgcaaaatgcttttaacgaagttttagcagaagaaggcttggctttagatgttgccacaatcgtaactcaaacgattgttgatgctaaagatgaagctttccaaaacccaacgaaaccaatcggacctttctatagcgaagcagaagctaagaaacaacaaagtatcaacccagaagcacactttgttgaagatgccggacgtggctggcggcgagtagtcccttcaccacggccaattggtattcaagaagcacccgttattcaaaaattagttgaaggtaacgtgatcacgatttcagccggcggcggtggtgtgccagttgcgaaagaaggcaacaagctccgcggggttgaagccgtaatcgataaagatttcgcttcagaaaaattagcggaattagtgggtgcagacatgttaattattttaacagctgtggataacgtctacgttaacttcaataagccagatcaaaagaaattaaccaacgtctcagtcgctgaattagaagattacatcaaagacgatcaattcgctaaaggcagcatgttacctaagattcaagccgcaatcgaatacgttaataatcgtcctgatagtaaggccatcattacttcccttgataacgtgaagaatttattggcacatgatgccgggacaattattacgaaatagaggccaagctaatggaaattgcaaatttcggcgttgaagagtggttaaacgtgtacgaaacacaagcaactttggatatcgcgcaaagtacgattgcctcaatgaccatgtcagaattgatggccctctcgcctgataacgggacacaattttatcaagacttagcgcaacaaaagatgaattatggtgcgattgagggctcagaggcctttaagcaagctgttagtgaattgtatcaaacggtcaacagtaatcaggtgttgcaaactaacggggcgaccggtgccaatttattagcgctctatgccttagtgaaaccgggcgatcacgtgattaccatgtttccaacttatcaacaactctacgaaattcccatctcaattggggcaaccgtttcgtattggcagttggatgaggccaataattgggtaccagatattgctgaactgaaaaagttaattagaccagaaaccaaattgatttgtttgaacaatgctaataacccaactgggacggtcatttcgactgaactgatgcaagcaatcgttgaagtggcacgaacggtgggcgcatacgtccttgtggatgaagtttatttaccattaggtgaaggccaacaaacaacttcgattgctgatttatatgaattgggcattgcgaccaatagtttatcgaagacctattcagtccctggtattcgggttggttggcttgtcgctaacgaaacattaaccgatttgtttagaaaatatcgtgattacaccatgatttgtgccggtgttttcagtgatcagttagcggtttatgtattacagcatcgcaagcaggttttagcccgtaatcgggcgcttgttcaacgcaatcttgagatttttaaagcgtgggttgtacaagaaccactcgttgatgtggtctatccagaatcagtatcaacatcgtttattcatttcaaagagattgaagacgatgaagcattttgcaaatatttattaaaagaatacggcgtcttattagtgcccggcaagcgttttgaaattcccggacatgcaagattagggtattgtgcaccagaagcaactctgaaaaaagggttggccgaattatcaaaagcgctcagaacctattaataattgagtgacgtaatttaggagtggtttaaaatgacggaagaaaaaccagcaaaaaaaattggcttattggcattaattgcattggttattagttcatctattggtagtggggtcttcggattaacatctgatttagcgagtgcatccgcaccgggcccagtgttaatcgcatgggttattgttggctttgggattttaatgctggcattatccttgaataatttattgatgaaagaacctgaactagaagggattttctcttacgctgaaaagggctttggcccctttgccggcttcattagtggctggggttattggttgtcagcatggttggggaacgtagcttttgcgacaattttaatgagtgcgttgggttatttcttcccgatttttaaatcagggcagaacttaccctcaatcttagttgccagtgttttatcgtggagcttaacatattttgttaatcgcggggtagaaggcgcagctgcgatcaatacattggtaacaatttgtaaattgattccactatttgtcttcattatttttgggattgtgttatttaaaggtcatcttttcacacaagcattttggaataatatgagtagtagctttgttgctggcgatgtgatgagccaaatcaagaactgtatgatggttatgatgtgggtctttgtcggtattgaaggcgcttcaatgttatcggcgcgggcggaaaagaagtccgatgctggtaaagcaacgattttaggattagtgagtttactagccatttatatcttagcgtctgttttaccttatgggtatttaacgcaagatcaattagctagcatcaagcaaccagcgatgttatacatttttgaacagatggttgggacttggggtggctacttcatcggtgttgggttaattatctcgattttaggggcttggttatcttggacgatgttacctgccgaaacaatgttgttaatggcaaagcaaaatttattgccagcttacttcggtcgcgtcaacaagaaaaaagcaccgacgtttgcactagtcgtgacagcggggttgattcaagttttcctattcaccttattattcacaacgaaagcttataacttcgcttattcattatgtacggcttcaattatcgtttgttacatgttggtggcagcttatcaaattaaatattcttgggcccaccttcaagaaaaaggaaatcggcaacaattattaattggggttttagccttattatttgaaattgccggaatcttaatggcgggtgtcagttacttattactctgttttatagcctatattcctgggatttacttctatggtcgtgcccgtaaaaataatgggcaccaacatttcttatcaaaaggggaatggttaatcacgacaattattgtaattggtgcaattatcgggatttggttagttgtttcagggaaaatcgttatttagatatgttatattagaactttggttactttgagtaaaaagtaataattgagaatactttgggagcgaaaatcatgattgccgcagacgaatatccaagatatattcaatacttaaggaccagacctgaatttattgatttttcagatgaagaaatgaacattctgatgaataatatgaaagtcaaagattttcataagggccaggaattgtttgatcaaacagatgagcgcagccgattctatttcgttgtaagcggtctcgtaagagccgaacgaacggatgaaagtgatgaatttacgttctatacgtatatcaagcaaaacttagcttttccttatcgggggatgtttactgatcaatattatccatacaccgctcgggcgatgacggatattgagattatttatttcccaatggcgacttttgagcatcttttacaaaagaataccgattcaattgttaaagtcgttcaagaaatgggctcgattattagtgaatcagaagatcagatccagcgaatggtaacttctagtgcgaaacaacgggttattcaagccctaaaaatatttgaaattaacttaggtgaaccgctacggtgcggccgctcatatattccgtatccaattacggtgaaggaattagcgacaatgagtgggactacccgtgaaacagcgggccaaattgttaaacagttggttgcccaaaaactgctgagttatgagcataaagaatttcggtttgaaaaagccttctttaaagatgacttggcgtaaaaattaaggggcacttcgtctcgagattaagtttaaaagcccataataaatcgtcttaaaagacaactattatgggtttttatgtgccaatcattgtaaacgctttaaagggatgtattaaaaaaggagatggcatgatgaatgatgctgaaataatcaagactaagaagcggtttaaacttaaaatgccgggggcttttgtgatcctcttcatactgacagtggtcgcggtgatggcgacgtgggttgtgccgtcaggatcttacgcgaagttatcgtatgaccaaaagagtacgcaactggtcgtgacaaaaccatcaggtcaagttgaaaaggtgccagcaacacaggcatcattagaccgactcggcgttaaaatcaaaattagtcaattcacttctggcagtattaatgcagccgtatcgattcccaatacctaccaaagattgaaacaacggccggccagtttagcagctgttcctaacagtatggttcgtgggaccgttgaagctgtcgatattatggtttttattttagtattagggggcttgattggcacggtcaaggctagcggcgcatttgagtcggggctgttggccttaaccaagaaaacaaaaggtcacgaatttttgttaatctttttcgtcgcgattctcatggttctaggcgggactttatgtgggattgaagaagaggcggtggccttttatccaattttagtaccggtctttattgcgatggggtacgattcgattgtttgtgtgggggcgattttccttgccagttcaattggcacgactttctcgaccattaaccccttttcagttgtgattgcttctaacgccgcgggtattagtttcacggaaggcttgttgtggcgagttggcggctgtatcgtaggggccatttttgtcatttattatctctatcgctattctaaaaaggtcaaggctgatccgacccaatcgtattcatatgaagatcacgacgcttttgataagatgtgggcaattacatctgaggggacgcagtcaaaagccgtttttacctggcggaagaaattaattctggtcttatttgtggtgaccttcccgattatggtctggggcgttatgtctcaagggtggtggttcccaacgatggcggcgtcatttttaacgtttgcgattatcatcatgtttttaaccgcgacaggaccagagggcattggcgaaaaaggggttatcgacgcttttgtgaacggtgcttctagtttagtgggcgtctcgctcattattggtcttgcgcgagggattaacttgattatgaatgaagggatgatttcagataccttattacaatattcgtcatcattagtcgcacatgttagtggtccgatttttattttgatcatgttagtgatattcttcgtgcttggctttatcgttccatcttcttcgggactagccgtcttatcgatgccgattttagcaccgttagcagatacggttaatattccccgatttgttgtggtaacggcctatcaatttgggcaatacgcaatgttgttcttggcaccaactggcttggtaatggccaccttacaaatgttagatgttaaatacgctcactggttacggttcgtttggccagtagtcgcttttgtgctgacttttggtggggccatgttagtcttacaagtcctaatttattcgtaaaatcgcgtagagaaataacgtgttttcttgcttaatcactaaagtctgatagaatgaagcaagtagaaattctagaattggagtcgattaaatggaaccagcgatcaagtatcgtttaatcaaaaaagaaaaacatacaggcgcgcgtttaggcgaaattgtaacaccgcacgggacttttaaaacaccgatgtttatgccggtggggacccaagccagcgttaaaacaatggcccctgaagatttgaaagaaatgggtgccggcattattttgtcgaatacttatcatctatggttacgccctggtgaagatatcgtcgaaaaagcaggcgggttgcataaattcatgaactgggatcggggtgtcttaaccgattcaggtggtttccaagtcttctcattagcaaaattacgtgatatcagtgaagaaggggtggccttcaagagtcatttgaatggtgaaaaactattcctatcacctgaaaaagcaattcatgttgaaaatgctttgggcgcagatattatgatgagttttgatgaatgcccaccattcttcgaaagttatgactacgttaaaaaatcagttgaacggacttcacgttgggctgaacgaggcttaattgcgcatcaaaacccagccacacaaggcttatttggaattgtccaaggggctggttttgaagacttacgtcgccaaagtgcgcgtgatttagtggggatggatttccccggctattctatcggtggtctttcagttggtgaatcaaaaggtgaaatgaaccgggtacttgattttacaacaccgatgttgcctgaagacaaaccacgttatttgatgggcgttggctcaccagatgcgttgattgatggtgtcattcggggtgtcgatatgtttgattgcgtgttaccaactcggattgcgcgtaacggaacaacgatgacgtctcaaggccgtttagtggttaagaacgcgaaatattctgaagatttcagaccactagatccaaaatgtgactgttacgtctgcaagaattacacacgggcttacattcgtcatttaatcaaagcggatgaaacttttgggattcatttaacgagttaccataacttatacttcttgatcaacttgatgcaccaagtgcaagatgcgattgaacaagataacttattggaattcagagaagcattcttcgaagaatacggctataacgaaaataacggccgtaatttctagcgaatcactggaagttaggcgataagtctgctaaagttgattagtagataaataacgaaaagaggtattttaaatgttaaacctagtattaggtgccaatccatttggcggcaactcaagtttcttaatcatccttgttttgatgatggtcatgatgtatttcatggttatgcggccacaaaagaaacaacaacaaaaacatcaagaaatggttaaccaaatgaaaaaaggtgaccaagtcgtaacaattggtggtttacacggtgttattgactcagtgaataacgatactaaaattgttgttttagattgcgatggcgtttaccttaagtttaacttaagtgctatccggacagttgaaccaactgctaaggcaacagaaacagttgttgaagaaacggttgacgaatcaaaagaagaaacaaaatagtaatttaaaaagcgtggttaattttctagcgatagaaaaattagccatgctttttttgtgattagtattagtgattttaaatacaatcagcggtgatgtgataggttattatgaatttgatgtgttaaattggtgtttttaatctgttaaaaaaatcacaataatggtttacaaacggtttcaaatgcgttatgctttctttgttaattaaatcacatataaaaattatggaggcattcctgatggttaaaaaagaaggcgttaaagcggttgttgatgcggtatctgaagtggataagatggtgacggatttagtcacacgggcccatgaagcacttaaaatcatggaaacattcgatcaagcaaaggtggatcatattgtccaccaaatggcgattgccggccttgatcatcatatggaattagctaaaatggccgttgaagaaacgggtcgtgggatttatgaagataaagccattaaaaatattttcgcaacggaagaaatttggcacgcgattaaagataataagacagttggtgtcattgaagaagatcctgaacatgggattactaagattgcggaaccagtcggggtcattgctggggtaacacctgttaccaacccaacttcaaccacaatttttaaggcagagattgccattaaaacacggaatccaatcatctttgcttttcatcccaatgctcaaaaatgttctgccagagcactagaagtcattaaagaagaagccgttaaagctggcttaccagctgacgccttattattcattgaagaacctagtttggcagccacccaagctttgatgaatcataccggcattgcaacggtcctagcaactggtggaccagggatggtcaaggctgcttattcaactgggaaaccagcattaggggttggggctggtaacgcaccagcttatatcgaagaatcagccaatatcaaacaagcagtcaatgatttaattctatcgaaatcatttgataacgggatgatctgcgcatcagaacaagcagtgattgtcgatgctaaaatctacaacgaagttaaaaaagaattccaagcacaaggtgtctattttgctaaagcaagtgaattaccagctttaaacgaagcaattattgatccagctaaaaacgctgtgcggccagcaattcctggtcaatcagctgctaatattgctaagttagctgggattgatattccagaagatacacccgttttaattgctgaaatcaagggtgttggtcatcaatatccactttcacatgaaaaattatcaccagtcttagcgatgattaaagctaaagaccgtgaagatgggttggcattatgcgaggcgatgcttgatctgggtggcttgggccacacagcatcattgcatacgactgacgatgcgttaccattagaatttgcaagacggatgaaggcttgtcgtgtattggtcaatacaccatctgcccaaggtgggattggtgatttatacaacgaaatgattccatcattaacacttggctgtggctcttatgggcataactcaatttcacataacgtctcaacaatcgacttattgaatattaaaacattggcgaaacgccgcaataatatgcaatgggtcaaattgccaagcaaaatctattttgaaaaaaattcggtcaactatttagaaaagatggctgatttaaataaggtttttatcgtcgctgatcaggggatggttaaccttggttatgtccggattgttgaagaagtgttagctaaacgggcgaatgacgttcaaatgcaaatcttctcagatgttgaaccagatccatcaacaaacacgatttataagggtgctgcagcgatgcggagttttgaaccagatgcaatcgtcgcaattggtggcggttctgtcatggatgctgctaaagggatgtggttattctatgattcagaagaagccgacttctttggcgcaaaacaaaaattcttagacattcgcaaacggacttacaagttccctaaacttaacaaaacgaagttaatctgtatcccaacgacttccgggacgggttcagaagtaacaccttttgcggtgattactgatagtgaaacccatattaaatacccattggcagattatgcattgacaccagacgttgcgattgttgacagtcaatttgtcgagagtgtgccaccacgagttgttgcacacactgggttggatgtgctctgtcatgcgactgaaagttacgtatcaacaatggcttctaactacacgaaggggcttagtttacaggcgattaaattagtttttgataacttgaaggctagttacgatggcgatattacggccaaaggtaacatgcacgatgcctcaacaatggcggggatggcctttgcgaatgcgttattaggcatcaaccattcactggcacataaattaggcggggcgttcaacttacctcacggtttaatgattgccatcacgatgccgcatgttatccgctataatgcgacaacgccaaccaaacgggcactctgggctaaatatagttacttcagagctgatgaagattacgccgaaatcgcacgttatattgggttgaagggtaatacgacagcagaacttgttgaagcttatgcaaatgcagtgactgaattggccgaaagtgttggcattcaaatgagtttgaaagctaatggcgtcacaaaggcggacttcaagcaacatgtggatgagttagctgaattagcttatgaagacaactgtactgttacaaatccaaaagaaccattgattaaagaattaaaaggcattttagaggcagaattttaaaataaattgaacaaaagggttaagctgaacaagaagggcttaatcctttttatattgcctaaatttaagcttgagagtattaatattatccaaaatagggcataatagagggtagacattcatttaattcagggagaactgagaaaagtttgtcgacaaacttgattaaggatcgggatggcaatgacacccaataaagaagactatttaaaaattatttttgaacttggtggcgacgcaaaaaaagttaccaataaggaaattctagcgggattgaacgtttcggcagcatcagtcacggaaatggtcaacaaattagtgaaagagaattacgtcaaccacacaccctatcaagggattcaattgacaagtgaaggtgctagagaagcagcgctattagtgcgcaatcatcgcttgtgggaagtttttctagtcgacaagttacattatcaatttaataccgttcatccagaggcggagcaactcgaacatgtgaccaaccacgacttggctgaacgcttagccgattttctaggtcatccaaaacgatgcccgcacggtgggattattcccaatgccaagggtgagtttgaacaacagagccatcacgcgttagtcgaccttgaagttggcgaaaaagcagtgattgaacgggtactagatgataatgatttattgaaatacacattagaaatcggcttgacagttggcgatactgtgaccttgacgaaggtgggcctttttgaaagccccattaccgtgatggacgaaacacagcaaactgaaattcaagttggcattaaagcggcgcaacacatttttgtgacgccaattgcagcagattaataaagaaagtggtgtgaacatgcgctcagatttagcagcattatttattatatttggtggctcgggagatttagcacaacgcaaattatatccagccctttttaacctatatcgtaaggggtacttaaaagaaagcttcgcagtgattggcaccgctagacgaccttggacggatgaacattaccacgaaatcgtgatggcctctctagaaggttttgaagaagatgacgaaacgaaacaaacttttactagtcacttctattatcaatcgcatgacgttacggatgctgaacattatgaaacactgaaggcattagcagcgaaattagatgataagtaccaattaaaccaaaaccgcatctattatatggcaatgtcaccccgttatttcgggacaattgcgagtcatttagggtcagaagctttattgaccgcagatgggttcaaccgtttaattattgaaaaaccatttggtcgtgattatgaaagtgccaaagcactcaatcaagaattaactcaaacttttgatgaaaaccaaatttatcgaattgatcattatttaggtaaggaaatgattcaaaacatcgttgctttacgtttcggtaatggtctattgagtggtgtttggaataatcaattcatcgataacgtgcaaattacgttagctgaatcagttggggttgaagaacgggctggctattacgaaacatctggtgctttgcgcgatatgttccaaaaccatatcatgcaagtcattgggatgttggcaatggaagtcccagttaacttctcagcagaagatgtgcaacgcgaaaagacacgtctgttcagaagtatccaaccttattcaccagcagagattaaacaaaactttgtccgtgcgcaatacgctgaaacaacggtcgatggtgaaaacaaaccgggttatcgccaagaaactaacgtggcaccagattcacaaaccgaaacgtttgttgctggtaaagtgatgattgacaacgaacgttggtgtggcgtgccgttttatgttcggaccgggaaacgtttagcgcgcaaggaaacccaaatcaacattgtcttcaagaagaccggggtcaacatttttgctgatgataaatcagatcgctcagcaatggcaccagatgtcttaaccatctatgtggaaccagaacaaggcttctcattaacaattaatggtaaggaagtcggtcaaggtttctcattgaaacccgaccaattgaattatcaatacgacaaacaaatgttagctgacagtccagaagcttatgaacgtttgattttagaagcgttaaatggcgatggcacaaactttacgcattggcatgaattagctgcttcatggcaatttgttgatgcgattcgtcaagtttgggatgcagatcaaacaccgcttcctacgtatgcaatcggttcaatgggccctaaagaagcgacggatttgttggcttcaacagatgcaaaatggatttttgatccaactcaaacaaaaaaataagaattgccgagaagtctgcgtgtgaagccattcataccaggcttttcttatcgcgtgaaagtggaggtgtaaaatggctgaattatttaaaattccgttggaaaacgatacgagtcgcaagattattcatattgatatggatgctttttacgccgccattgaagaacgtgagcagcccgacttacggcaaaaaccgctgattattgcccgtgatccaagtgacacagggggcaaaggggtcgtaacgacggccaattacgttgctcgtcaatatggtgtgcattcggcgatgagtgcccaaaaggctgccgaattaattcctaaacatcaagctgtttttaagacgccgaactttccgttatatcagtccgtttcggcgcagattcacgaaattttccatacggtgaccgataaaatcgaaccaattgcttttgatgaagcttatttagatgttactgaaaataagttggggttagcgcacacgattgaagtcgtcgcttatttacaaaaggcgattttagaagaaacgcaattggtcagttccgccggaatttcctacaacaaatttttagcgaagatggcttctgattaccgtaaaccggctggtcggacgttggtattgccggaacaagcaatcgcctttttaagccgattgccgattgaaaaatttagaggggttggtcaaaagacggtgccgaagatgcaggatttaggcattatgaccggtgctgatttattggcgcaatcggaaatgtttttgatgcaacattttggcaagttgggttatgggttatatcgccatgtgcgggggattgataaccgaccagttgaataccaacgcgaacgtaaatcaatcggtaacgaacatacttacggacaaccgttgattagcgaagaacaagtacaggcccaactgaaaagcttggcggttgaattggcccagcggctgcgcaaaaatcaaaaacacggtttaacagtcgttttaaaagtgcgtaatcgacaatacgaaacaattaccaaacgcaaaacacttggtgagtatgtcggcaatgcagccgaattagaggcaattgctaaccaaatttggcaatcaatcgggcaggcggaagtcgggattcgcttgttagggattaccgtgaccaatttagcaccccagacttttgaaaatataacgctcccactttatgattgggaaaatgatagatgagattactttgtttttgtcgggtaaaaccgatatactgtaagtaactatgaaaatgggctaatagtcgaattggcgcaaaataggattaactaagcggaaacggcggtggtgtttgagtggcaacgaagcatgatcaaatattaatgtacattgagaatttgccaattggcgataaaatttcggtgcgctcaattgccaagacgctagcggttagtgaaggaacggcttatcgggcgattaaggccgccgaaaataacggcttggtcagcacgattgagcgggtcggcacgattcgaattgaacaaaaattaaaaggtaagattgaaaacctgacttttgccgagattgttcaagttatcgatggtgaagttttaggtggcaaagatggcttgaataagttgttggataagttcgtaattggtgcgatgcagttagcggcgattacccggtacattacaccgaaatctttattgatcgttggtgatcgaatcgacgtgcaacgattagcgttggaaaatggcgcggcggttttaatcacgggtggctttcacacctcagatgaagtgattgcactggctaatgagctagcattgcccattttacaaacgacctatgatacgtatactgttgcgacgttgattaaccgggcattaaccgaccaattaatcaaaaaggaaattacgacggttgcttcaatctaccgcccattttcagaaacatactcattattggcgactgatacggtcggcgattacaagaaattgagtgccgcggttaaacattcacgcttccccgtgattaatgaacaccggcgcttagtcgggattgtcacggtgaaggatattttggataaaccagcttcgatgacgcttgataaggtgatgacgaaagaacctgcgagtgttaagaagtatatgagtattgccagtgtcggacatgcgatgacttggaatagtttggaaatcatgccggtggttgctgataacctcgaattagaggggattatcacgcgccaagacgtgatgagtaatatgcaaacggcccaacgtcaaccgcaagtggccgagactttctacgaccaaattatcgaactactgcaccctagcgagagtttccctgaattttattcggcagcgtatcagtttgaagtgagtccgcaaatgaccaacaatttagggacgatttcatttggtgtcttgagcgaagccgtttcggccgcttgtcagcgcatgttgcaagcgacacatcaacgccattcaatgattgaacagattaatttgcattatctgcgcttaatccaaattgaaagtcagattcagattttaccgcggatattagagattggccggcgttccgctaaaattgatgtcgatgtttatgccaatcacgtcattgttgccaaagcaattgtgacctgccaaattttagaaagaggttaatcaatgactattccagaacaaattattgctaaaattaaagcttatcaaacgattattattcatcgccatgtcaatccagatccagatgcgattggttcgcaagttggtttggctgaagtgattcgtaatagctaccctgataaaaaggtttaccaagtcggtagtgataccggcaacttagcttggttagccaatgcgcaaccaattgatccggctttatatcaaggcgctttggtgattacaactgatgctgccaacacgccccggattagtggcgaagattataaccaaggtgcttacttgattaaaattgatcatcatcctaacgatgaaccctatggtgatttaaattgggtgttaccggatgcttctagtacatccgaaattattgttgatatgatcaacgatagccaaggccaattacaattgaatcaagcagccgctcgtgtgctttacgccgggattgtcggcgatactgggcgcttcatgtttaattcaaccacaccgcacacaatgacatgtgccgcgcaactgatgacgtttgccattcaacatgataagattaaccaacggatgaacgagattacactcgaacaagcgaagttacaaggttacttatttgatcaattgcaggttaatgacgaccaagtggcttatctggttgtggaccaagaaacgcaaaaacgtttgaatgtatcagcccaacaggttcattcaattgttggcacacctggccgattaaaaggtgtgttaacgtgggtcatttttgtccaacaagacgatggtacttatcgcgtccacttccgttctaaagggccaatcattaatgaattggctaagcaacatgacggcggtgggcatccgcttgccagcggggccaaagcagctgatcaagctgaaattgacacgattattacggcattatcagcgcttgctgctgattacacagcacagtaacagatacttttttgacggatttaaacaatagaaagcaggactttatggataatcaatttacacaatttaatctaaaaccagaaatcattacggctttagacgagatgcactttacaaaaccaacggcggttcaacgccgtgtgattccagccatcaacgctggtaagagtgttatcggacaatcacaaacagggagtgggaagacacatgccttcttattaccacttttaaataagttagtccctgaaaaagacgaagttcaaatcgtcattacagcccctagtcgggaattggcttaccaaatttatacggccgctgaattaatcacaaagcatatgaatggtgatattcggattggtcgctacgttggtgggactgataaacaacgtcaaatcgaaaaattacaacaacaccaaccacaaatcgtgattgggacacctggtcggattttagatttgattacaagtaaggcacttaagatttatacagctaaaacattagtcattgatgaagctgatatgacgcttgatatgggctttttgaagccagttgataatattgcgagccgcttaccagaagacttacaaatgatggtcttctcagcaacgattcctgataaattacaaccattcttacaaaaatacatgcataacccagtaattgaagaagtgaaaaatgaaacgattattagcccaacgattgaaaactggttggtgccaactaagggcaaagccctcaatcaaacaatctattcattaatcacaatgggccatccattcatggtcttgatctttgcaaataccaagagcaaggttgatgacatccatcattacctccaatcacaaggtttgaaggtcgctaagattcatggcgatattccaccacgtcaacggaaacggattatgaaggaagttcataacctcgattatcaatacgttgttgcgactgatttagccgctcgtgggattgatatcgaagggattagcatggttatcaatgccgaagtgccacgcgaagatttagaattcttcgtgcatcgtgtgggtcggacaggccggaatggtcttaagggtactgcgattacactttatggtccagatgacgaacaagctgttgcacaaatcgaagcaatgggaattaagttcacaccaaaagcctttaaagatggcgaattggtgacttcttatgaccgtaaccgtcgtaaaaaacgggttgcaacaactcatgaattagacgttaacttgaagggctttgttaaaaaggccaaaatcaagcgtaagcctggttacaagaagaagattaaagaagcaatccaaaaggatgcgcgtcaaaaacgtcggattgaacaacgtgttgaaatgcgtgaacgtaaacgtaataataaaaaacaaaatcaataataataatcgctaatgagtttataaatgaggtgttgtcatggtacatgaaaatgacttgcaattaccaaattggttacaattatcggaacaagcccggcgtgctaattttggccaggttttacggtattttgtcagcccacttgtcgccattgaagggattcaaccggaagtggtccaggctggtcgactaacatttaagacatatagtgcttggttttctggtgaacagttcgtcttcattccggcacaatcagccgttagtttaggttggtcattgggcgcggataagctggcaccgagtgaatggtttgcacaaaccaatcggcaactggctgctaacgaggggcaactctgggcagataaggctgatgtagatgcgtatgttgagcaactcaccacgccgagtcggattgttaatatgccagcgttactggtggcacgagaatccgtaccgcgtgattggctagcgcaagggcgctattcaccaatcacacgacattttacaggcaaccaactattcttcagtcgttttcaagctgagattcaaaatggactataccgaacgcagcctgagacaccgttgttagaaacggcgcacttagtgttacggcttttggcagaccaacaagtttatcaggtttttgagaaaatgactttcacggatcaacaactcagacaaacattgcggcaacaaggctatgactttgtcagtgttgatcagtacgaatggttaagaggtgcgggtgcgcccactttatggccaagtggcaatcatttaccacaaccaatggctgaatcagcggcttcgtttggtttagattttacggctgaccaacaggcttatgaaataacaactgacccgcttgtttacaagggtgggccgtgtgtcactggtggtcgctatcaacttgaacgtcagttaccaagctcgccattttatgaatcaggcgtatcaactgcgttgatgggcaataccgatcttgcgacgcgttatcggcgcacaatcactgttgcactcgagtagttgacaagtggcggattattttctatacttttgaagtgctgggatatacgttaatcattagaacgacaggaacaacacccttgactgagaggtgctgactacggattgacgcgctccccaacgcctaaataattgaataaactcataaagaggttaacgactaacatcgttgcaatcaaggtggtaccgcgcttttgcgtccttgaatttgcagcggtgttttattttttaaggagagaatgatatgaaacaactcacaagcgcccaagtgcgccaaatgtttttagacttttttaaagaaaaaggccatgatgttgaaccaagtgcctcattgattccagacgaagatccaacgttattatggattaactctggggttgccactttgaagaaatattttgatggccgtgttgtgcctaataatccgcggattacaaacgcacaaaagagtattcggacaaacgatatcgaaaacgttggtaagactgcccgtcatcatacattcttcgaaatgctcggtaacttctctgttggtgattactttaaagaagatgctattccttgggcttgggaattcttaacaagcgacaagtggattggtttagatcctgaaaaactttacgtgacagtttatcctaaggataaggatgcgcaccgcatctggcacgaaaaagttggtttagcagaagaccgaattatcgaagtggaagataatttctgggatatcggtgaaggcccatgtggtcccgattcagaaattttctacgatcgtggtcaaagcttcaacaatgtcagtgaagacgatcctgaaaactaccctggcggtgaaaatgaacgttatctcgaagtttggaatatcgtgttctcagaatttaatcacttaccaaacggtgaatatgtcgaacaaccacacaaaaatattgatacggggatgggtcttgaacgacttgtctcagtgattcaagaagccccaactaactttgaaacagatttatttatgccattgattgaagccacagctgcaatgagtgaccataaacaatacggtcaaaatgccgctgacgatatttcatttaagattatcgccgatcatgcacgggcagttacctttgcgattggcgatggcgcaatgccagctaacgaaggacgcggttatgtgctccgtcgtttaatccgtcgggccatcttaaacggtaagaagttaggcatcaacgacgctttcatgtacaaattagtcccaatcgttggcgaaattatgcacagctattacccagacgtcctagaacaaaaagacttcattgaaaaagtgattcgttctgaagaagatcgtttccgcgaaactttaaatgatgggttacgcttattaaaccaaacaatcgaagccgttaaagctgaaaacgaaactgaaattaacggcgcagatgctttcaaactatttgatacatttggtttcccaatcgaattaacaactgaatatgctgaagatgaaggtttaaccgttgatcaagctggttttgaaaaggaaatggctgctcaaaaagcacgtgctcgtaatgcacggagcgatgaacaatcaatgggctcacaaaacgaagtcttattaaacatcaagactaagagtgaattcacaggttacagcgaattagaaactgaaagtcgtctagcagatatcattcaagataatgctgaacaagaaagtgtgacaaccggcgttgcgcaattagtctttgaagcaacaccgttttacgctgaaatggggggccaagtggctgatcaagggattatcaagaaccttgccggtcaagtggttgctgaagtcacagacgttcaatacgcaccaaatggccaacctttacacactgttaaagtgttaaaagaaatgatcagtggcgtccactataccttatctgttgatccaaccttcagaggcggcgttgttaagaaccatacggcaacccatttattggatcaagcattaagagatgtgttaggcgaacatactcatcaagctggttcattagtggaacctgattacttacgttttgatttcactaacctgggccaagtgacaccagaccaattagctgaagtggaacaaatcgtaaacgataagatttgggcagctcttccagttaatacggttgaaaccgatattgaaacagctaaacaaatgggggccatcgcgctctttactgaaaaatatggtaaaacagttcgtgttgttcaaattggggattactcaatggaactttgtggtgggacacatgctaataacacctcagatcttggcttgttcaagattaccagtgaatcaggtattggggctggcacacgtcggattgaagccgttacttctaaggcagcctttaaatatttaaatgacaaacaagtgcttttaaatgaattagctggtgaattaaaagttgcacaaacaaaggatcttcctaagaagattcaacaattacaagctgatttaaaagcagaacaaaaagaaaatgaacaattaaaagctaaatttgcgcaagaacaagccggcaatgtttttgaaaatgttgttgaagcaggtcaatggcgcttagtggcagcagatgcaaaggttgccgggatgaatgaattacggcaattagcggatcaatggcaacaaaaacaaatttcagacgtcttagtgctcgcaactgttgcgggtgacaaggttagtttgattgtggcagtagctcctgatgcgattaaagctgggatcaaagctggtgacttaatcaaacaaatcgccccacttgttggtggtggcggtggtggccgtcctgatatggcccaagctggtggtaaaaatccagctgggattccagatgctttggcagctgctaaagaattcttagcttaatagataaaaaataaagttgattatttttaatcaactttatttttttgcagaaaacagcatgttccgtttgaattgtggtatagtggatattcagcattatgacaaccgagtgatgcgagttgtacttttactgattttcgagtagaatatggttgtataagtagcgaaaagttgaggtgttgagagatgaatctagataaaacagtccattttgattttggtaagaatagtcctaagaatgtgcatgaaacattggtaacggtctaccaaactttagaagataagggctataatccaattaaccagattgtcggctacctgctatcaggggatcctgcttacattccacgctataacgacgctcgtaacttaattcgtaagcacgaacgagatgagattatcgaagaactcgtgaagaactatcttgataaggggaatactaaataatgcgcttaatgggatttgatgtcggttcaagaaccgtcggtattgctgtgagcgatttatttggttggaccgcccaaggtgttgaaatcattagaattaatgaagatgaatctgaatttggtttagaccgagtgaaagaactcgttgcacagcaccaagtaacgggctttgtcttggggttacctaagaatatgaataattcaatcggcccccgggcggttaaagcacaggaatacggtgccatgttaaccgagttattcccagagatcccagttgattatattgatgaacgactaacaactgttcaggctgaacggatgttagttgaacaagctgacacctcacggaaaaagcgtaagcaagtgattgataaacttgctgcggtaatgattttgcagaattatttggatgctaagggccctttgacgaaacaagggtattaaagcaaccggttaatgaatttgataattaaatattaaggggttttgatgaatgactgaaacaaataagaacatccaccaagaagcagaacaagaaattactttaatcgatgatcaaggtaacgaagaattataccaagtgctctttacttttgattctgaagattacggtaaatcatatgtcctattatacccagcaagctcagctgaagacgaagaagtcgacatccaagctttcgcattcacatcagacgttgcaggagacgccagccaaggcgatctcttcccaatcgaagatgatgaagaatgggaaatggtagaagaagtcctaaacacattcttagcagacgacaatatgcaataaaacagagtgcctctcaagcttgatcagattttgagcattagcataggttgtcagattagcgattatatcgctaatctgacaaccggcactaagcgcagaaatctagcttgggaggcacgttttaattagactgtcgattatttgactgacgtgctaaccacaagaatcaggttggtatggcacgttttgttagagtgaccgctctagcttgggaggcacgttttaattaggctatgccataaaaaaatagggatcaagacgctaaatcgtcttggtccctattatcattatgagcgtaaagcctgtgcttttttagtgttaataaaatgcaatttagcaaattggcctaggtactctaaaccgccttggtccaataaatcagccgcaattttgtcgatcgatttgtgtgcaccgactgggatgtcgcgtccagcgagtttggaaagttcaatcattgataggttagcttgatggcgagcaataatggaggctgccgcaaccgctagatgaaactgttccgctttagttgtaaagtagacgttatcacgtaataccaccggttcgtcttttaaataacgatagtaggtggcacggggttcgaattggtcgattaaaatgccttggggctgatcaggttggatttttttcaaaacttttaagagggcgaagttatggctgaccgccttcattttttcgatattcatttgttcgtgaacttggttatacttttgcggcatgatattgacgatatgataagggagtttggtcatcattttaatcgccatctgatcaatctgagcgtcagttaatgtttttgaatcagcgacgcctaaattgcggacaaagctgagattttcctgactgacatagacggcggcaatcgtcagtgggccaaagtaactgccattaccgacttcatctgagccgataaccgaccagttagcaaaatcgggtggtagtgtgtcacctttagcagaccccttagtagccttacttttcttggcaggtgctagtgggccccatttagcggcggctgcttcggctgttgcgccttgaaaaaggactttgccggagcgatagccggtaacgttcaaaccgttaccacggtgggcaaaaacggcaccaggtggtaggggacggttggacggataagtttgttgaattgtttttaattgcgctggggtcatttttatcacagcttgcatgcgccatcctcctcaatgaatggtaaaataagatattaatggtaaaattgctacttctccttatttcatgataaaatagttcagttgaagtagcaaattttatttgcgatgtctgaagcaggttaccagaaataactggttggcctgatagtgatgaatcatatcaaattaaaagcgcggttaaggggaaattatgctaagtctaattattatcttaatgttgttacatgcggtttatactgggatgcgccggggaattgtcttacaggtcgtttatgcaattggttattttatcgccttttggattgcggttccattgagtcagacactcggacctaaattgaatttgttagtgccgtatccatcggcaacagaagaaagttactttgcctttttccaacagaaggtggggttatcactcgataaagctttttatatcggtgtggcctttgtattagtgatgttcatcagtggcctgattattcgttttattggcttattactgaactcgttaacgtttatgtatgttttcagtcgctttaataaggttttaggtggtgttttaaacttcatcgttgtctatattgggattttcttagtgttatatgtcttggccttagtaccagttgacgggttacagaacatgttggcccattcgtggctcgctaagatgatggtgcttaaaacaccactattaacctcacttgtaacgcaatggtggatagttggttaacatagttgtaaggggctgacgaaggtcgccccttttttagaaggagttaacagaaatgaatcataaaatattaaaaacattagagtacgataaaattaaacaaatgttgcaaggttatgcgattacagcatttggtcaagaacaaatagcaactttagaaccgattaatgaagcagatctgattcagattcgcttaaaccaaaccaaagatggtgttgatatcgaacggttaaaaggtggcattccattgccccaactggaaaatatcagaccacatttaaaacgaattgaaatcggtgcgatgttaaatggtagtgagctcgctcaaatcgggcgcgttttacgtgcgacatctgccgtggttcgtttctttgatgacctggaaaaagacgaactcgaattaaaagccttacccgaattagtagcgcaatttgtcacgttaccacaattaaccgaacgaattagaagttcggtggctgatgatggtgccattttagatactgcttcaaccaagttacgcggtttaagaacgggcttgaagcagttagaaggccagattagaagtcggatggccagctacacacacggtgccaaggctaaatatttaagtgatccgatcgtgacgattcgcaacgaccgctacgtgattcctgttaaacaagaataccgcggccaatttggtggcgtcgtgcatgatcaaagtgccagtgggcaaaccctattcatggagccccaagcgattatggaattaaataaccgtttgcgccaattacaaattgaagaacaacaagaaatcgaacggattttggcggaattatcagaagctatcatgccggaacgtcacaatattttagcaaatgctgaattattgggtcaactcgatttcgtgaatgctaaggcccaacttgcgaaagctctaaaagcaacggaacctttaatcaatgcggaaaaccatgtcgatttaaaacaagcacggcatcctttaattgatgcgactaaagtcgtggccaatgatattgcaatcggtgcggattatcaagcgattgtggtgactggtccgaataccggtggtaaaaccatcacacttaaaacattgggcttagtccaagtgatggcccaatcagggttattcattactgcgcgtgaggaaagccaagttggtgtcttctcagatatctttgctgatattggtgacgaacaatcaatcgaacaaaacttgagtactttctcagcacacatggaaaatatcattcagattctcaaacagattgatgatcggagtttggtgctattagatgaattaggtgccgggactgatccgcaagaaggggccgctttagcgattgccatcttggatcaaatcgggattgtcggagccaacgtggttgcgtcaacccattatcctgaattgaagatttatggctacaatcgaccacaaacaattaatgccagcatggaatttgatgtggcgactttacagccaacgtaccgtcttttaattggggtacctggtcggagtaatgcatttgatatttcaacgcgcctaggcttaccaaattcaatcgtcgatcaagcgaaacagttaatgaacgatgaaagccaagatttgaacaatatgattaccgatcttgaaaatcaacgtaaagcggctgaaacagaataccaagcactacgtcatgaattgacggaagcgacggatctacatcaacaactctcaacagcttatcaacaattctttgaagatcgtgaaacggaaatgacgaaggctaaggaaaaagcaaatgcgattgtcgaaaaagctgaagtcaaagcggataaagtcatcactaaattgcgtgacatgcagatgaatcaaggcgcacagattaaggaaaatcaattaatcgatgccaaggctgaattagggcaattacatcaagaaacaaccttgaagaaaaataaagtgcttcaacgggctaagcggcgtcaaacgctgaaagttggggatgacgtattggtcacgtcttacggccaacgaggcactttaattcgccaagtcgactcgaaaaattgggaagtccaaatgggcatcatcaagatgaagattgccaacgacgatttagaaaagcaaaaagtcgttgaagataaccgaccacaacgccatgtaacaaccgttaatagcggtggcgcacgccacgttaaagcacaattggatttacgcggcaaacgctatgaagaagcaatggccgaagtggatcaatacattgatgcggcgctattagctaattatcaacaagtcacgattgtccatggtaaagggactggcgcgattcgccaaggggttcaagaatacctccaagctaaccgtcaagtgaagaagtacgaatatgcaccagctaatgctggtgggaatggtgcaaccattgtgacgtttaagtaaggtattgaaattaaaaactcagaagctagtgcattggtaatgccggcttttgagtttttttaattgttttttggcgggcaaaagtgtagactaaaagtaagcaatcggttttacacaactgattataggaggtgcggatatggtagatgttttaacggataaagattttgaagcagaaacaagccaaggtgttgttttaacagacttttgggctacttggtgtggtccttgtcggatgcaatcacctgtcattgaagaattagcacaaacaaatgataaggttaaattcacaaagatggatgtggatgccaaccctgataccccagctaaatttgggatcatggctattccaacattgctcgttaaaaaagacgggcaagttgtcgaaacaattactggcttccacaataaggaacaattaacggaaacattagctaaatatactgattagagcacaacgacgattgtaagcatgcgttgaaaagcgtctctaacaactgaaggaccagggggagaatttctttaccaggtccttttttagtcctcaataatgtgtgacaaaaatgttagtggtggttattaaatcggtgtggtacctttaataaagtaataaagcgtaccaatcagaaaaaagagaaagaaatggtgaaaatgggacaaaaaatccttaatttttggcaaaaaccagttgtcaatttcattggcagaacgattatatattttgtaattctcttaattttactctacctgtacgattacagtggtattggtagccctaaatttatttataatgaattttagtttaatgaaggagcgtaatggtgatgacaaatagcattattcaaaaaattgatacaattgcgattgaacaaccgcaaactgtagcgtatcaatacggtcaaacgcagtattcatatgcagacttaaaagttgcatccgatcgaatcgcggcgtttatccaagaccaagcattgcctaagggcgccccagtgattgtttttgggggccaacagttcgaaatggtggcgacattcttaggcgctgtcaaagcaggccatgcctacattccggttgaacaacactcagatgcagaacgcattcaacaaattgaatcggttgctaaaccagcggcggttctatcatgggcgtcagctagccaaattgaggttgacatgccggtcttccaagctgatatattagcggacgttgtggcaagtggggcaacagattatgatgcccaacaaagcgtccaaggggatgataacttctatatcattttcacttctgggacaactggcttaccaaaaggagttcaaattagtgaaaacaaccttttgagctttgttgactgggcgaacccagcctttggagttgccgataatagtcgggtcttaattcaagccccatactcatttgatttatcagtcatgaatctttatccagggctttgctcaggtgcaacattagtaattttagaaaaagaaattacggacaacttcaagactttatttgaagtattgccaaccttgaaggttaacgaatgggtttcaacaccatcatttgttgaaatctgtttactcgcaccaacgtttgatagcgaacattacccagaacttcgtgaattcgtcttctgtggtgaggaattaacgcaccaaacggctgaaaaattactcgaacgcttcccaagtgccaaagtcttcaatacttacggcccaacagaagcaacggtcgcaatgaccagcattgaaattaccgccgatattctagcacagtatgatcggttaccaattggttatacaaaagctgatacgaagacggttgtggttgatgaacaaaacaatgaagtcgctcctggccagcctggtgaattattgattagtggtcctagtgtttctaaaggctacttaaataaccctgaaaaaacgaatgctgcctttttcgaaaaagatggccaacgtttctatcattcaggagacttagtggttgccgatgacaatcaattaatcttctacaaaggacggactgatttccaagttaagatgcatggttatcggatcgaactagaagaaatcgatcatcatttagggcaactagcacaagtgaaacaagcttgcacggtccctcgttacaacaaggcacatcaagtaacgcaattaattgcttacgtcgtgccagctgaaggccaagtgggggatgcgacattaacaaaaacgttaaaagcagccctggctgaaaatacaatggcctacatgattccccaacgtttcgtctatccagaaagtttaccattatccgtcaatggtaaggttgatcgtaaagcgttgattaaagaggtaaacgggaatgcctaatttacaaccgtacgcaaatcctaattatttcattattttaggaattgcgttagtgccgctaatcattggctttttaaatggtaaacggtggcacatctatgaaacacttgtttcactgctctttttggtcttaatctttgacggtgataagattaatcaagggttagctttaatcggctacgtgatattcgaaggggctctcatttggggctacaccgtgtatcgtcaaaaacgtaataatacagcattgttcgacttggcggttgtcctagcgattatgccgctagtcattgtaaaattcgtgccatttttaaatccaggacggaattcgattattggtttcttagggattagttatttaaccttcaaagctgtcggcatgattatggaaacccgtgatgggagtattaagaagtttgaaccatggttgttcttacaattcatgcttttcttcccaactatctcatccggtccgattgatcgttaccgacgctttaagaaggattatctaaaagtacctgaacgtgatcactatatcgacatgttagggaaagcaatgcacaacttcatgttagggtttgtgtataagtttatcttaggttatgcattcggaactttgttattgccaagaatggcgcacttagccatggcaagtcgcggcggtttcttagatatttcatggggccttgtgggttacatgtatgtctatagtatgtatttattctttgattttgcgggttacagtttattcgcagttgggacgagttatgtcatggggattgaaacaccaatcaactttaacaagccattctcatcaccaaacatcaaggaattctggaatagatggcatatgacgttatcattttggtttagagattacatctacatgcggctcatgtttttcttgatgaagcataaaatcactaagagcaaagtattaatcgccaaccttggctatttaacgttattcttattgatgggcttctggcacgggttaacctggtattacatcgcttatggtttattccatgcgatttggattatcctaacagatgtctggttacgctttaagaagaaacataaggatcacattatcagcaatcgttggacaaattatctcgcaatttttgcaacatttaacacagtatgtttaagttttttaattttctcaggcttcttggaccgactctggttccattaagaccaaacaattgaaggagcgttttaatcatggatgtagaaaacacagtagtagaaattttggcagatttaacgggtaacgatgatatcaaagatgatatggatatggatttatttgaaacagggacattagattcaatggcgactgttcaattattacttgaattacaaggtcaattagacatcgacgtaccagtttcagaatttgatcgtaatgaatgggcaacaccaaacaaaattatcgccaaagcaaaggaattgcaataagatgtttaagaagttgtggctgatttttgggccagtgttaattgccggggtgtgcttaggcgcgttattattatcgccatttcgctttagtcatccgagcgctaagactttatcaacagcggcgacatcaatgtcatccaatgtgattaaaggtgaagccatcaaggatgctgcgtttaatgcggattatattcccgttatcggttcttccgagttatcacgaatggatccattacatccatccgtcatggctgagaagtatgattggaaaaataagccgttcttaattggcgcacctggtacacagtcattaacacatttcttatccctccaagcgacaggacaacacctaacgggtaagaaagcggtcgtgattatttcgccacaatggtttgtaccacgaggggttaaatcagaaatgtttgatttcttctattcaccactgcaaacatcgtacttcttagttcatgctaaggattcagcagcaacacggtatgcagctaaacggattctagatttaacgagtgatacaaccagtggggtaatgcgggatgcattaaagaacaaggcgttgggcttaccgttaacaacggtgcaaaaggtgtatatcaacaacattaagcgcccaggcttgcaacaccaagatcagctcttcagtcaattgttcattcacggtcgtgaaaaagaattggctaaaggcttgaaagttttaccagatgaacaagacttacaaacacttgaccaagttgccacaacacttggtcgcaaagcaacagccggtaatccatttgggattcaaaagaaattttatgaacaacgaattttaccaaatcaagcgaaattgaagggcgaacaaagtaactttaattatgaaagttcaccagaattttcggacttccagttgatgctcgatttctttgcacagcacaagatggcagtgcaattcatcattccacctgttaacgcacggtgggcatcttatacgggcttatcacaagacatgttaaataacttctcgacaaagatttcttaccaattgaaatcacaaggctttaacaatattgttgatatgaccaaagatggtaacgaagattactttatgcaagatacgattcatttaggctggcgtggttggttgaaggttgaccaacatgtccaaccattcatggcaactaagaaggctggtaaggtttcatataaaatatcagatgactacttagatcgttcatggcaagatgttgctggtaatcaagtacaagattttgaagaataaactaaaaaagcgtgctgacaattgtcagctgaagtgaaccctaaatattggacgaaactttaagcagctttctgggttgtaaaaattcggtattcaaccggacttttacaacccagttttgttttaattcttgaaaaattataatcatcaatccaaaccgatatttgtgaaactagcgtttcataagtatcggtttctttttggtagaaagcttcggctttcataatatggaaaaagctctccattgatgcattatctaaacatgttgcttttcgagacatactttgaaaaatgcgatgttctttcaagatattagtccaatcttgatgctggtattgaaacccttgatctgagtggactgttgtccggtattttaaattcttagggattttcttaactgctcgatttaaaacagttgttgtaaattcaacagtagggtgtctgctaacttgatggctaagaatttcacctgagaataaatcataaatacatgtgaaataggcacgttcgtcaattgtcttggttccccagcgaacttcagtaacatctgtcactagtttttgatagggacgatcagtgaagaaacgacggtggattaagttcttagcaacggtcccaacattacctctatatgaattatacttacgagtacgtttgttaaatgcagttgatagtaattgtagttctcgcattaagacaagcacttttttatgatttactaagatattcatacgatgtaattcaccagttacacgacgataaccgtacgctggatgattcttcttgattgtttggatggcttgtttaacagattggtcagatgaaccgttcggttcatggctaataatgtattcatacgtacttttagccataccaactacttttagaatttttattaatttatgtttaagccttagctcttggatgacttgcgcttgttgtcttcttcttcctgaactaaggctcttaatttttttaggtattcattctcgatttgtagtaattcattttcttctctcagacgttctagttctgtttgctgccgttttttcgattgtttatcagctgtcataattgtttgccgtcctttggaacgatataaggcatcagcaccctcagtctcccaaatatgttgccattgccagatggtcccgacgtttgagatattaaaatgaagtgcggttttcggataagaagccttattcgttttcatccattttaaaacattcatcttaaatgagccatcaaatattttatcaggtgataggacatcgagcccctttagaccaaaggtctcataacgtcgaatccaaaaaagaacagatgaagaacttttaataccgtatttcctagcaattaatctgtatcctatggaggaagtcagataatcctgaacaactttcatttttaactctttagaatatttggtcaatataaaaacccccggtattggattttggtccaatatcgggggttcacttcaagcacgctttttttattgcttagtcacacttcttataacgtgttcattcaacctgatttctgtgctttgcaacacttgtcaaactagcgattgcatcgctaattcaccaatttaagtaaatgctcaaaaccactcagttgaagtcacacttcttatttaaccactttcaataccgattggatcatttcttcatatgcgattgggcctttgtacatccagcttgatgatttgtcatagctgtagagttgcttattcttaacggctttgacattttgccagatcggttccttaaacatagcagccccgcggtcgctgttaactaggaaaatatagtcggcatctaattcggttagtttttctaaagaaacgggcatccagtcggcggttgcgtttttagaaattgttttaaccaactcaggttcttttaaaccgagatcttgatagaggagcgcgccacttgcggcgtgatcattgaccatgaaggctgagttatttgtaacccataaaacagcggctgatttattcggcgcttttgtttggattgttttcttggcgctagctagtttttggtcatagtcttttaaaacggcttgccccttatcttctttgttaacagctttggcgacatcttttaattgggtgcgccatttgactttagcgccatttttgacaacgtaggttggtgctagtttgttgtattgagcatatttaccaccttgaacagcactgttgtcacccactaaaatcagatcgggtttagctttagcaactgcttcaaatggtaaatcgtagttgatagtggggacgttttttaagtattttgcgaggtagtcttggcgactggtcccatttttgacagaccattgcacgactggtttgatatccagcgaaataagataatcttctagatatgaaccaataacacgtttggggtgtgtgggaacgcttaccttatggtccatactatcggctatggttcgagtttgtttcttagtggctgttttggcttggcaaccagctaagatgattaatgacgttaatcctaaaatggcaataaaacgacttgactttttcatgagtttcctccaaaaatataattgagaactattctcattatcgaatgtttacagtgtaactatcaagttgtttcggaattttgatattgttttctcatataagattgttatctgagaaatgttttcttataatatgtaagagccgttaatccggcgaaaggtgagcggaattatggcaattttagaaacacaacaggttagtgtcggttataatcgacgcttaattattcaggatttatcaattcaaattcctcaagggcagattacaaccttgatcggacctaacgggagtggtaagtcaactttgatacggacgttagcccatttgttgaaaccgtcttcagggacggttctgctggcagatcaggcgctagcgactaagacgcctaaagagatggcccaagaaatggcgttattaccgcaagttggggaattaacgaccgatttgtctgtctttgatttagtatcgtttggacggctgccttaccggcaacaattcagacccttgtcagcggtcgataaagaaaaaattgagtgggcaattgaacgaacggggcttaatcaatttagagaccgtttcttgagtaccttgtcaggcgggcaacgccaacgtgcttggattgcgatggctttggcgcaagacacagatattttaatattggatgaaccaaccacttatttagatttgacccaccaactagaaattatgttattaattcaggaattaaatcagattgaaggccgcgccattatcatggcgttgcatgatttaaaccatgcggcccgtttttcagatcagttgattgccttaaagaatggtcaattacaggccagtgggacagtcaatgaggtcatgacgcgtgataatttacgacacatctttaatattgatgcgacgttaatcgaacatgatcagcgtcccttaatcctaacttatgattgctggtcagaaggggaacaggaccatgatgaataaaaaattcggcttttctttagtgattagtttgattctgttagccattctgatggttgtcagcattcgctatggtgcggcacaaacaacgatgaagacggtctatcatgcggtttttgattatcacgcaagtcaattacaacaagctgtgattcatgaaattcggttaccacgggttttaggcgccgctttaataggcgctagtttggcgggtagtggcctgattatgcaggaactaacgcaaaatccattagccgattctggcttattaggcattaacgcaggtgcagggttcatgttaacaatcagctttatcgtgttacctaaagcgacaccgcaacaaactgctatttttgccttaatcggggccgcactgtcagcctgtttaatcttagcaattagtatggctaaaaagacgcagaaaacgacgacggtagttttagccgggatggcgattagtagctgtctggttgctttaagcgaaggcctttctttaatgacccagcttaaacgggatttagcgttttggcattttgggggcgtcgcggcgattacgtggacgcaattaacgcaactaggaccatggttaattgctggcttgattgcaagcctctgtttggcaccgcaactacgtttattacaactaggtgatgaacttgtattaagtttaggtcgcaagacgagtgtcgtgcggttattgggctttatctgtgtcattattttagcgggtatttcagtggccttagttgggtctgtcgcttttgtcggcttgatggtcccacacattacacgttatctagttggttacgatgtgcgtaaggtgatgccagtcacgttattattaggggccagtctggttgtggcagcggatttgatttcgcggacgattaatccaccacaagagattccctttggcattatgattgccttaattggcgtgccattcttcatttatctagcgagaaaaggggcgagtcaagcatgaatatgatgacaaaacgttatcggcgttggctcgtcgggttgtcggctttgttaattgcaacgaccctggttagcttacaaacaggccaattagcgattggtccacaagcaatcggccagttattgattggtcagggtcaagcgcaagatgcgttaatcttagttgattttcggatgccacggattattattgcaatcttagtgggctttgcgttagcgattgcgggtgaagtattacagagtacgacgcaaaatccattggcagacaccggctttttaggaattaattcgggtgcgggaattgcggttttattatttattacatttgccgccgatcaaggtagtcagatttttatattaccggtattagctttgattggtgcgttagtcagcgctgtagtaatcgtgattggcgcgtatcaaaagtctgtggggattacggccaatcgcctattactaaccggagtcgcggtttcgacctgtttttctgcattaatggtcttattgaccttgaagttatctcctgataattatcaatttgtgatgacttggctagcagggagtatctgggggagcagctggccatttatctgggcgctgttgccatggttgttattaacactgccttatattttcagtaagagtcaaaccttggatgcctttgttttaaaacctgataacatgcgttcattgggagttgattttcaaaagcaacggttgtacttgattggcgctgcggtgatcttggcgggtgctagtgtttcaattagtggtgggattggctttatcgggttgattacaccgcatattgcccgcagaattatcgggtatcagcaccgctatcaattactattaacgggacttttgggcagttgctttttattggttgccgatacttgtggcaagctattgagccctactgccgaaataccggccggcattattgtggccttaatcggtgccccttactttatttacttactaatcaaaacgaaatgagaggagtatgaccgcaatgactaacatttacgagacaacgattattggtggtggcccagctggtttgtatgctgcttttcaagctggtttatacggtttaaacggccaattattggaaggggatcaacaatttggtggcaaggttgccacttatgcggagcgtgtgattcacgatattggcgggatgcccaacattacgggccaggatttaattcagaatctaacagcgcaggccgctttttatgacacacctttgcgcactcaaaccttagtgacagacgtcaaatatttagccgaccaagattattatcaaattgatacgccggatgatcggtattatagtcaaaccttgattttagcgatgggtggtggcgtggtccggcctaagcaattacggttgtttgaggaacaaacttttgaaaacgtccattatgcaccagccaaccctgaggattatcgggatcaacgggtggtcttaattggccctgggtataactggatggaattggcgccgcatttgttagcgactgctaaatcagtggtgtggttaacgaccaagcgcccctttgtggatgaagcagctgaaaaagcgttcttaaccgcttatccacagattgactattactgccagccttttgcaagttatcaacaggtagatcaacaagtgacgagcatcacgttggcggatcaaacgcagattacatttgatcaagccgtggtcagtcttggctaccgccggtcattacagacgattgatcagtggcagttaagcgcagaacagattgaagaacgcccagatatttgggtgattggtaatcaaattccggatcgtgctgggattagcttgttaacaagtgcttttcaagatgggattacggcgataactgagattgttgcccaacttaaaccaacagctaaaacaccgatggtcacgacgcataatccagttttccaggcggatacaaaagcctattggcaagaacgattacgatagatgggataataaaaaaaggatctgatgcaaacttggcatcaggtccttttgaacatatttaatgttttttacgacggtgtaactcttggcggctagggagattagccacactgctaaaggaagctttagcgaccggttcatgttccggttcaggtgttggttcagtagtgactggtgtcactggttctgctggttcagtgggggaaattggtgtgacttcaggcgattgcatggtcaccattgcttctgtttcaagcgggatttcaatcggatcatttgtatccgtttgaacaaaaatagtaactcgttttttattttcaacggttgccttagcttcagcagtgacttgtaattgttgctcaagggtttgggctataaaaccggcttcgagttggaagtcgggtgttttgaaatcggctagtcgcttagtgataatcggaccagtgagttcaaaaaagtattggtttttcttttgctttttaagcgataattggccaaagttaatttgttcgaagaattgactgagatccgcaattgattccaacggaaatttagtagctaattgcttaccagcccaataactaatgccttcagtttcatcacctaaaataagcggtaataagatatcgcggagcgtggcttgggctaggtaagtagcggtttgaggggtatctgtgagttgtgtgtaaagtgattgagtcacgacggtgctcctttttaataacattttttaattaagatagttgtattataccgcgaaatcagattattttttagtatttaaagggtagtcggttgaattttaggtaaaaaaaagagaaaatagagtttacgaatgcattttgtgatgaaaagagaaagactactatgaagaaacaaccaattggttttatggattccggtgttggcggtttgacgctagtcaaagaagcccgcaaacgcctcccaaatgaagacatggtgtttattggtgatcaagcacgattaccttacggcgaaaagccggctgccacagtacgcgaatttgcttggcagatggctaatttcttacgccatcaagagattaaggcgctagtgattgcctgtaatacagcaaccgctgcggccttacctgacttacaagcccaattggcgattccggtgattggggttatcaaaccaggtagtattgcggccctacaaacgacgcataatcgacgtgtcggggtgattgcaacaactggcacaattcaaagtgcggcttacagtcaacaaatggcagcccttaatcctgatgtgcaagtgactggattagcagcaccgcagtttgtgacgatgattgaagccaaccaacgacacggtcaagcagtgcaaaccatcgtcaatcagattttacaacctttacaaaaaagtgagattgatacgcttgttttaggctgtacgcattttccattattgacgaccgccattcaaacggtagtggggcctgacgtgacgttggttaacccagcagtccaagcgattacgatgttagaagaagtcttgacgcaacaacaacaattggcgacaaccacgccagggacgctacggatgtacacaacaggctctgtcgccgcttttgaagagattgcgcaacaatggcttgcccaaccagatttaacagcacaacaagttgatattcaaaaggagaaaaatgatggtccggaccgataatcgagcagcaaatgatgtacgccctgtcaaagtacagtggcattatctgacgaaacaacccgcttctgtcttatggcaacgcgggacaaccaaagtattagcagctgtcagtgagcaagcaactaagaaagtcacgctaattggcagtggcttgacgcaagtgcaaagtgactggttacaacagacgctaaccactttgttagcgcccgctttggaaaagacggggttactggtgtcagtgacggttttagaagacggtggtagtttactagcagaagctagcaatgccgtttttggggccttgcaattattacctgaacaattcttacctaatcgtgcagcagccgttacggctattctgaccggtaacgaaacattagtggatgccagtgacacggaagaagcggttgctgatagcacgttgttagtcgtgaccgataatcaagaacaaattttagcgatgacgttacaaggcgcaacggcggttaacagcagtcagttaaacgaattgttattggtcgctagccaaggcggtacacggactgctgaacagattcaagcgagttatcaacaagctgtccacccaatcattcaaaaggagcactctgagatgccaacaattgtgattgccactaaaaacccgggcaaggcccaagaattccatgcgatgtttgaaaaagaggggatccaaattaaaacgttattggattaccctgaattaccagaaattaatgaaaccggtcaaacctttgaagaaaacgctcgtttaaaggctgatcagattgctgctattttacagctccccgttttggcagatgattcaggcttaatggtcgatgccttagatggtcgtcctggcatttattcagcccgttttgcgggtgatcataacgatgccggcaataatgccaagttattatacgaattaacgggcgtccctgctgaaaaacggacagcccatttccatacaacgttagtgtttgcgaaacctgatcggcctgacgatgatttagtggttgaaggtagtgttaacggtcggattctaggaattccccgtggcgataacggctttggttacgatccgttgttttacgtaccagaactagataaatcaatggccgaattatcgatggccgagaaaaatgcgattagccatcgtgcaaaagcgattgaaaatttagaaccactttggcgtgattggttggcaaaataggaggaattaagatgcggttagtagtagtcagtgatagtcatggcgatcgggatattttggtgcaattggttgcgcattataaggatgaagcagtcactttcttacattgtggtgattccgaattaacgacgaccgattcattatttcaacaaatgacggttgtgcaaggtaatatggattttaatggccacttcccagaacaagtggtggtgccagttggggcgcaaaaggcctttttaacgcatggtcatttgtacggtgttaattttgatttaacgcggttgatgttagcggctcaagcagaaggcgcgcaattggctttttacgggcacacacatcagttagcctgtgaaatgcaccaagggctcttggtattaaatccgggcagtatttcgcaaccgcggggccaattccaacccttaggtggcacatatgctgttgtggatatcacggcgactgactatcaagtccaatattatgaccgccattttgaaaaagtaccacaactccaatttaaatttaaaagagcttaaagttaaagactatccaaagtttagacgctgtggatagtctttttagttagtggtttggtacaatattaaacgtaggtaattagaaggaggacactgcatgatttcagatgcgtttcagaatttattactcgaaaacaaagaacattttttaattcctggtgaaatggtcgctagcgttcaggaaaataactcgttagaacatgcgtttattctcttaacaactgttaaatattcaagtattccggtgctcgataatcattcgaagtttaaagggatgctaaccatgccactgattacagagacgatgttaggactcgatcacttgagtttcgataacctccgtaaaatgaccgttcaagatgtgatgcaaaaggatgttgtgacaattaaagatccgtacgatattgaagaaacacttcatttattggttgatcatccttacttaccggtattatcagacgacggcgaattcacagggattgtgactcggcgcgagatgatgaagagttttaaccgggtagcccataatattgaaaaagaatataagattgaggctttaccaatagagaaacaacaaaattagtttattttagcgcattaaaaaagcgttgcgccaaaagttattttgtcgtaacgctttttttgatagctaaaatatgctttttgaaactgccttctgcgtttagcgttactcgtcaaacaactgcttgcagcagttattcgccgagctgtgctaatgctcaaagccaaagcgtttcaaacgcactctttaggcccgatcgaagtaaatcgttgcaatggctcctaagacgagcatcaaggcgattaatgcgattggccctagtagtgcggttaaaccacccacggccggccaagcgggtacaacgcccgtttcagctaggatccagatggctgctaggatcacgcctaaaacgccagcataaacatattgggcatagtgagcgagtaagtaatgcatgattttagcgacaatcacggtcccaatcacagcacctagcataaatggcaagaggagggcgacacttttgaaagcctcgcctgcctgttcaaagcggccggtaacgagataaacgagcaaatcgagtaattggctagcggcgtgatagacagtcccgtattgcttgataatcatcaacataatcgaacccgaaataccgggaatcaccatcaatgaaacggagaaaaagccggtaaaggttaacatcccgaaatcttggagggacgttagttgtttgatggcaatgtcagattcgttttgatgaccaccaattttggtaatcaataacatcaagccaccacaggcaatggcaattaagacttgctgccagtttagctttttaagcttgcgccagatgaacggtaaactgcctaaaacgaggccgatgaagaaactataagcggccagtggataagcggtgcataaccataaaataactttggtcgataataaaacaccgatgcccgcgccaataccgattggccataaaaagccaattgcttggcgccaatcttgtttgaactgcgcgatggcctttaataatggttcatataaaccaacgatgacggcaaagatactaccagataaaccaggaataacgagtgcgacaccgatgagggcgcctttgagtgcattaattagtggcataagagtgctcctttggcggataatttagttggttaaagtcaatgaactggtgggtaaggtaatcccagcggcgttaatcgcctgtaagtaaccttgtaggaataaacgttgcgtcgttgcttgttcgccgttaagcgtgtgcatcaccacttggtaggcaagtgtgccatccgttaaggttgaaacccccagtaatgtggggccgtctttgatttcgggatggcgcggcactaattcagtgttgacttgcttaacgattgttgcgagttgttcgatatccgtatcagggttgatacgaatattaatcagtacccgcatattgttgcgggaaagattgctgacgattgaaatattccggttggggatgaaattgagcgtgccatcgtagctttgcacttgtgtggttcgcaagccaatcgctgtaacggtaccttcaatcgttccaattcggacggtattgccaacgtcaaattgttgttcggcaaggatgaaaaagccagtgacaatatcgttgacaaatccttgggcaccaagaccaacggctaaactgaagatcccagcaccggcaattaatgtcccgactggaacgccgataatgctgagcagtgcataaaggtaaaagaaaattagcagataagccaaagcgttggtcatcagggtatagatggtattcattcgattgttggaaaaaccatctgcttcgcgatatttgcgaaaggcccgtttgataataaaacgcccaatgcgactaagcaagtaaaaaagtagtgaaattaaaatgatttgaaaaaagcccgtgatgaagagacctaagaggtgatcccaatcgatgctggttatatagcgcataaagatattggtttgcttttgaaccgactcgacgggtgtggtggttagtgattgaaagaacatgctgacaaactcctttaaaagtgcataattctagtttagcaaatgtttaaaaaaatgacatctaatatagtatgattatttgaaggttgtaccgaataatgctatcctagagactgagaaacaagataatagacgacgaaataggaggaacaaattgatgacgggtggtcaaattgcagcattaatcgctgcaggggcttttgcagttttggttgtttttctaatagtgatgttattaaaagtcactaaggttttaacgcgtgtttccgagacagtcaccgaagccaataagagcgtgacaacaattacgaatgatgtagatgtcctttcaagacaagttgaaggtctgttgaacaaaacgaatgttttactagacgatgtcaacggtaaagtagcagatttagatccagttttccgtgcagccggcgaattaggcgagagtgtttcaagtttgaatgctgccagtcgtggtttgactgaaaaagtaacaagtgtcggtcgcacgaccgccaaagcaacagttgcttctaaaatgggggccagtgcccttagattctatcaaaatagacgacaaacaaaagacaaggagtaattcacatggcaaaaaaaggctttttattcggtgttttagtgggcggcgcagcagcaattggtgccacacttttattaacacctaaaacgggtaaagaattacaaaataaattagtggacttgggcgaagatgccattgatcgcgcacaagactattattacttgatgaacgaaacggctgctgatcttaaaggagaagcgaagttccatatgaaccgtgtgcacgattatgcgagtgattggcaagaaaatgcacttgatatcaaagaacaagctaaagcgcaatttgatgaaaagacggcagacttaaaatcacaattcggtagtagcttagaaccagctgctgaagattttgatgatatcgtcattgaaggcaagagtgcttttggccaagccaaagatgaagcagaagaaaagatggcaccagattcattaggtgaataaaggattgttaaaaagccctcactgattgtgagggctttttaatttggaggggtgattgtaacacctttcgtagaagttacccgtttggcacagtactctatctgaaacgtgccattaattgcaacaacttccgcttaatctaaaatgagccataatcttaaaaccaagattatgactcattttgtattaatgctcagttgctagacgcaattaagggcactcttatttgaaacgtgcttcttcgaactgccttttccggttaacaaaaaacgcgaatcatgaccaagggcgtcataatccgcgtttttaagttaatcctcaaagtcaattcgttcgaatcagcactcttacttgaaacgtgcttcagcaggcatatttctgcggctagctacgtccgttaaacgaccaacaagttggtcattcaccagactaggctagtcctcaaaatataaccgcttgcttacgcactttatccgaaacgtgctttcattaacagctttctgtgctttgctacgtattgcaaaacgaccggcagagccgttcattcacaacactaggcaaatgctcaaaagctccccgttaatgacgcactcttagaatgtttgtagttcttttgtcatgtgtgtgaatgattctgcgcctgtttctgtaacgtggacacagtcttcaatccggacaccggcaacacctgggatgtaaatccctggttcgattgagaagcacatgcctggtttgataatcatgtcgttaccttccatgattgatgggaattcgtgttctgaagtcccaatcccatgacctaaacggtgaataaagtattcgccataaccggccttcgtaatcacgtcgcgggcaatcttatctaattcagcagctgtaatgccgggtttaacagcatcttgtgcagctaagtttgcttcaagacaaactttgtggatttcaagtgacttagcatctggtttaccaaaagcaacagtccgtgtcgcatcactcatataacctttgtgtaatgtcccaagatcaaagagcactaatgcatcaggtgttaagatattagcttctgggccaccatgtgggttagcagcgttgatgcctgattgtacaattgtatcgaaactcatatgcataacgcctttacgcattaaagcatattcgatttcagcaacgatgtcttgttctgttttgccagcttttaaagcgttgaaaccaacttcaaaggcgtagtcagcttcgcggccggctgcttccattaaagcaatttcttcaggtgttttgattaattttaagttttccatgaagcgtgatgcatcaccagggaatgttgcgttagggaattgctttagaattgcttcataacgttgaacgggaaggtcgtctttttcaagagcccaacgtgttgggttggccatccgtttcttgatttgatctgcgatgatggcatatggatcttcatgatcaaggtaaccataaacatcaagtttccagccagccttcttagcagattcaacttctagttgtggtgtaaataggaatgggtcctgatctgcaaaaacaaagagggctaaaacacgttctgcaggatcactttcaaaaccagtgaaatagaggatgttagttggattactaatgtaagccacatccatattattctcgacaagccaattttgtaattgggctaattgattattcatctaaagcacttcctttacagttgataatcacagtatagcacagaaaatgtaaacgttaatgtaaactacaaatgaaaacaaaaatgaaaatttcataaaaataatgtaaaccgcttgcatttgccttaaatatctgttaaattaatcaataagtgaaatgaaaacaaatgaaaatacaatatattttattttgcgaatgaaaggaatcattttaaaatggaaaaacaaacaattacaatttacgacgttgcgcgtgaagctgacgtatcaatggcgactgtctcacgggttgttaacgggaaccccaacgttaagcctgccactcgcaagaaagtgcttgaagtgatcgaccgtttagactatcgtcctaacgctgttgctcgtggtttggcaagtaagaaaacaacaactgttggggttattatcccagacgttagtgatatctactttgcttcattagcacgcggaatcgatgatgttgccacaatgtacaagtacaacatcattttagcgaactcagatgaaaacaaccaaaaggaagttcaagtattgaataccttattggcaaaacaagtggatggtttaatctacatgggtcacagtatctcagatgcaatccgtgctgaattcgcccgttctaagacaccaattgtgttagctggttcaatcgatccagacgaacaagtcggtagtgttaatattgactacgttgcagccgttaaggacgcaactttgaagttaatcaagaacggtaacgaaaaagtcgccttcatctgtggcaacttagagttcccaatcaacagcaaatatcgtttacgtggctataaagatgccttgaacgaagctggtattccttatgacgaaagcttaattttcgaaacagaatacagttacagtgctggtgaagccttattcggtaaggttcaagcaactggcgcaactgctgctgttgtcagtgacgatgaattagccgtaggtgttttaaatgctgctgttgatgcaggggttaatattccaactgactttgaaattgtgacaagcaataacacgaagttaactgaaatggttcgtcctaagatgacatcaatctcacaacctttatatgatatgggtgctgttgggatgcgtctgttaacgaagatgatgaacaaagaagaaatcgatgataagacaatcctattgccatatagcattgttgatcgtcaatcaactaaataaaacaaaaacaagcggtgattacataatctgtaatcaccgcttgttttttattctgattctgattgactagcttttgtttcaccgtacgtaattgtaccgtagccgttattataacccatataatgattccagaaggtttcgtaattgctgcttgtgccaccaattccgaattcgtattgcgttgcttctggtgtccaattattgtaaagcgaagtgaccttaccactgtcaacggttcgcgtattaccattaatggaaacaatacctggcagttgaccagttgctttaacaactttgctacttgtaacggtacttggtttttcatgatcttcttcaagtttcatgatacttggatcattttgatagacgctattggctaacttagcccaatagttttgattaattgtgctagaactatcggttaagttacgaccagtactgtcataacccatccaagaagcaagggtaatccctggtgtgctaccgataaaccaaacatcccggttatcattattagtcccggttttaccaaccaggttattagtgttgaagtagagttgatcgctcaattgtgttgcggtcccatccgtatctgttaagacacctgataacatttggttcatgatgtaacttgtcgccttcgagaagactcgtgttttcttagtgtgatgtttataaatgatattaccagcagggtcagtaatcttatcgatcacgtaagcatcaacgtgttggccttcatcggcaaatgtagtaaaggcacttgcttgggcgagcacactaatcccatctttggttccccctaaggcaagtcccaattgactatattcatcatcagaaaggtgaatctccatcttatccatataggtcgcagggttagtcgttttacgtaacttattgtataagttaacggttgggatattgagggattgcgctaaagccttatccgcagggatgaacttgttttggatggtgttaccataatcggttggcgcataagttttgaagttagttttaaagtcagccaacatcgttttagaaccgatcagtttttgatcaatcgctggaccataaaccaagagtggtttaatggttgaacccggtgatcgtttggttaacatgtagttagtttgcttgagggagaagtcgcgacccccaacaaatgaaatgactttaccagtctggttatcaagtaagacactcccgttttgaaccggtgtgtcgcccactgattgcaaaccagtaattggatcggtcgttgcatcttgataggttggtccaaaagaactgccttcttgtttgacgatttcttgcattgaatcatagatatctttgtcaattgtactatggatttgatagcccttagtacttaagagttcagttgcctttgtttcatattgtttgtagagcgttgggctactattaagcttttcagtcgaaacattggcttcattggcgagttgtttcgtcatgatatcagttgcttgtgattccaaaaggttataaacgtagccataacgcttagaagttgattcaggttctgctttagcttggaattcactcgttaaatcgactttcttggcagctttgtattctgctttggtaatgcggtcatcacgatacatccggaataaaacggtattcttgcgttctagtccgtatttcaagtattcaggatctttcaaggtaccatcttggtcatatggtgtatagacggaagggctctgcggaagaccggcaatataggcggcttcggctaaagacaagttcttggcatctttaccgaataacccttgagcggcttcttgtacaccagcaacgttttggcctttattatttcgacctagggttgcaatattgaggtaatcttgtaagatttcctttttcgtgaagtatttgtcaacgcgtaaagcaagtaaaacttcagttgctttacgtttgaaggttacttgggatgttaagacttgcatcttgattaactgctgcgttaatgtcgaaccaccagtttgagaaccaaagccggttaaatcagagatgacagctcgtaacagggcctttggaacgaccccttgatgtttatagaagtcttcatcttcagttgcgacaatcgcatcggttagataaggcgacatctcattgatgctgacgggtgtccgcgagagatcagtcttaattgcgccgaattttgtgttcttggcaaagtaaaggccggccgcttgatcagtgttatcaagttgttgtttaagcacttgataacttgggaccggttcatccttcatcaatgcggcaaagtagccggcaccaatcccaagacctaaggcaaacataatcaaaccgattgaaatgccgtagaggattaaacttttaagtgcttctaaaaagacattaagcttaaaagtgaggggtttggcactaaattgatcgacaaatgttcgattttggtctttgtcttgatgtttaaaccaattgttaagccaaggcattgaatgtgataatttcgttttaatcttggaaaatagcgtattgactttgcgacgccctttagagatgagggctgatgcgtgcttttgccgttggctggaacgctgctttgaatctttcaaataataacgccaccttttttctcatactgtccaatattatataatagtttttctgaatattatacctgtatttaaatttgtaaggtaaatgaaaaatatgaaatcgccagaccaatcaataattgatagctaattagcacggtagtggaaacgctaactggtaggtataccaatatttagacacagaattaaatttaaaatgcttgcaaatgaaaggggcctgctttataattggactataccaatggttctttgaattctaaattatgaggagactatcacgatgaaaattattaaagtaaaagatcaagtagaaggcggccaaaaaggctttgaaatcttcaaagaaggtttagcaaacgacgcgaaagtattcggtttggcaactggtagttcaccaatcaaattctacgaaacagttgttgcaagtgacctagacttcacaaactgtacatcagttaacttggatgaatatgttggcttatcagctgataacagccaaagttaccactatttcatgaaagaaaatctatttaataagaaaccatttgcaaaatcatacttaccaaacggtttggcaagtgatattcctgctgaattaaaacgttatgaccaagtcattgctgataacccagtagacatccaaattcttggtatcggccaaaatggtcacatcggttttaacgaaccaggtgctgcttttgacagcaacacacaagaagtgcaattgacagaatcaacaattaaggctaacgctcgtttcttcgaaaacgaagcagacgtgccaacaaaagcaatctcaatgggcattggctcaatcttaaaggctaagaagatcgtcttattcgcatacggcgaatcaaaagctgaagccatcaaaggcacagtagaaggcccacaaacaacagacgttccagcaagtgctttacaactacacgacgacgtgacaatcatcgtggacgaagcagcagcaagcttgttatcaaaatagagtgcgtttgaaacggttatcttctgagcattaactggatttgacgaattgacgatgaaatcgtcgatttggcaaatttggttaagcgcaggaagatgtttcaaaaagcacgtttccacacaaaaagcccccacatccaaatcaagatgtgggggctttttgtaatgctattatttcaacgttgccatcacttttgccattgcggcttgttgataggccatcgctgcatttttagcaactgcttgtcgttgcgttgcagtcattgctggattagcttgcatggctgccatcacagcttgtttaccggcgttagttgcgcccgctttgagttgtgcttgttgactctttaatgttttagcgagttgtttagcttgagcgtcgcttaaaacgagccagcccttagcaactttgaaggtattgtggcggctcacgaattcgtggtcattgccagaaataccaaaccagaatttagccatgtcatttttatacacacggtatttggtagtggttactaaggcagccttatcagcattcttttgaacactgttggttgtcttttcagtttgggttgctttaggtttactttggtggatatcagtccgataaaggtaaactttttcggtaccattgccaagtgggtgatagagcaacattgacatgcccttagcatcggcacttgaaacaagggtttgtgtcttagtttcggtcacagttttcatgccataatgattgtgatcattttgaacgatgaaaaagagtgacgcgataaaagtgagaccgaaaatggtcattaaaattgggcgccacattttttgaccgaagattgaagcaaagaataacgcaagtgtactaataatgagtgtaataacgatcatgctttggcacctccattagtagttgatttcttagaggagaggaagaatgtgataatgaagccgatcacacagaaaatcacggcgacgataaaggcggcgtgataacctgaaagggttgcattaatcattttatcacggaaggccaatggtaaggtcttgaccatgtgtgtgcttggcatattgtttttggtaacacttgaaagcacactgattaagatggctgtcccgattgagctggcaacttgccggaaagtattattaaccgctgtcccatgactgattaagttcattggtaaagcattcatcccagaagttgtaacaggcatcatgaccattgaaatcccaaacatccgaacggcatataaaacgacgatgtagatgattggtgtcttagcagttaaaaagataaatggtgcagtagcagccattaataagaacatcccggtcatggccaaacgttttgcgccgtacttatcaaaaatacgacccgtaattggcatcataattcccatcatgagggaaccagctaataaggttaagccagaatggaaggcagattcgccacgaatattttgaatatataatggtaagaccatttcggcaccgaccatcgccatgtttgtcacaccacttaaaatagcggcaattgtgaaaacgggtgatttgaagacgcgtagttccaagaatggattttccattgtgagttgacgccaaacaaagagggcaattacgatgacgccgactgccaaggtagcgaggacaagcatgtcgccccaacctttatctccaacttcagagaagccatagagtaaactaccaaagccgacggttgataaaataatagaaggaatatcgattttaggtttcgaaagttggataacgctcttcatttggaagctcgctagcactaagacgagtaggacgattggaataatcattccgaataagacccgccagttgtatgaatcaataatccaacctgaaagagtaggtcctaaggcaggtgcaagaccgataacgatcccggccatccccatggctgtgccccgtttttcaggtgggaaaatcgtgagcataatggtttgcaagatgggcattgaaatcccaacaccggcggcttgaataagacggccgattaataaagttgcaaatgagctcgttggtgcgatgtaacaaataatggtcccaagtaaaaagacagtcattgctgacatgtagaggacctttgagttgaatcggttaattaaccaagcactaatggggatcataatcccgttgactagcaagaaaccggttgtgagccattgaacggctgaagtggacacgtcaaatgctttcattaatgtggggaaagcagttgataaaatcgtctggtttaagacagtacaaaaagtaccaatcaataagaccaagactaagactgtccggttgtatggtttcccatgaatatctaatggtctagagtctgacaagataaaaatctcctttacgttttgttgatgcgatttattagtttagtcgcatttttagcctttgtcaagtaagttgacaaagatgtcattcgacttgacaagttttgtagataatctataatgaaatttattaataggaacggagtggggacttgcaaaaagacctttttttaaagttgatagatacggatcgattaatttttgggattagtgaagtttgtaagatggcaggggtgacgccgcgtcaactccgctactgggaacaaaagggctacattaaggcccgcgaagcagatggcaataaggcccgtgagtacgacgctcaaatgatgattaaggccattttcatcaagcatttcttagatgaagggtacacgttgagcgttgcggtccaaaaaattcaaaagcacatggctaatatgaagattgtgcgatcgattattcgggaacatttcgaagggattgaagaactagatggcgaaatggctgtgaatctcgggtatttcgatgatacaaaacaacaaattttatatgcgattgtcaaagaagggcattcaacctttaaattagtggatgcaccgactaaagaataaatggcaaaaagtgattgctaggactcgggtaattgggtcctaacaatcacttttttattgtctaaaaattcagtacgcatcgcttgaaacgacttaatgtgtcgggtccgttgtttataataacgttattaatttaaacataggggctgattactgatggaaaaacgacaatatttgcagtttatcaacgaagggtacggctttgaattttatttgaacctcgtcggctttgtcgcagattttaacggcagctatccaactgaacgggaatttaaaacgatccttgaagaaaatggtgtggcttatacggcgattagacggcataaactcaaacaaatgtatcctgagatgtttgcgaagcaacatcagggacatgaagacgctaagcaatatcaatttgatttggatcatcaggaattaggtgttcagcgagtgtattatgcttatagccaacctgaattggttgatgaacagggagcaacatgtctgacgacgacaacgccgacttttgtcacgcggcaaccacggtatcgccttttcgataacagcggtcagtattatctttttgatgtgccccaagatcaatttgaacaacagttaaatgcactgcctacggaggtgctcgattttgaacaaccacatgttgctggaattttaatgttgatcgagcaggttaaacaattggggtatacggtagtgggctatcatctaagtcacatagaatcttatccggtcgtcgaaccggcgctcctcacggcacttatcaaccatcagcaagagacgcaccaacccacttttgagccaatcaacgacttgctgaatattaaaacggattatcgtagtttgttgtgttacgacgatcagttgaaaataccggttttcaataaagaatcaagtcaacagttcgggcgggatgatgaactgtattttaaaattcgggatgcagcggggcaagtcgtctttgaccgtttgacgttggatatccttggcacgattttattttgtgtggggcaacagttaccactcgaacagattcaagccgcttttttaacggatccaaaagcgtcatttaaagcgggggaggattactttatgtatgatcgattggcttgctcggctgaagtgccaattgaaaccttaaccgatattaaaaaggtggcactgtgctcagtagatacaacgcaaacgattagtgaatattggcggtggtcgcctcgtgatttaatgcgttatggtaaggctattatgccggaggactttggccaaccagcaccggcagcagccctcatgctggcatttaatcaacaattgactaacgcgttgcgtcgtattttgaagcaatcagcttggcaggttcgaaaagccacgcgccaatttttagtactagaagacgttgttaatgttgatttagcgcttgaagatagtcaatcggaagaggcattgagcgcggcacaacagatttatgctgctcaaatgaagacggcggcagaaacgcgctatgatttgctagtcgatggtcaatgtgtcttgcaggaagttccattagacgaattattaccggccattatggaatttgctaatgaataacagtataaaaaaagagacgaccaatgttggtcgtctctttttagtacaattaagttagttttaacgtgttaaacgataaattgcgtctgcatagatggcaattgcgttcatgatatcttcgatatgcatgtattcatttgcttgatgcataacattttcgcgttcttctggtaaagcaccgaaagcaacaccacgttctaagattcgaccgtatgtgccaccaccgataacttgttcgtgacctttaagacctgtttgatcttcaaagacttgtaataaagttgctactaattcgtcatcaccaggaacatagtgaggtgcttgtgcatggccttcgattgttacgtcggcaacatcactaagtgtcttagcaaggccttcgcgtgtactttcatcagttacacctttagggtagcgaacgttcaagagaacagatgcaacaccgtcttgtgtgtagttgaagacagcagggcaagctgttaaatcacccatcacatcgtctgtatggttgatgtttaagaggtgaccacgtgagtcttcgtgcattaaacgagcgattgtaccgatgtagttgccacctttagcatctaatgcaaagtcagctaagaatgttgccaagtgagttgcagcatttacgccagctttaggttcttgggcatgtgagcctttaccgattaaatcgattactgtttggtcaccatcagttgtgatagtaccttgtagtttgtgttcagctacataagcatcaaatttagcttggaaatcagctggcattgcaccagttaagattgccttagcagtttgaggaaccatgttagcacgtaaaccagacttgaagcttactaatgtcatttcaccatcagcgccatcaactggtttgaaagtgatcatgtatgacacaattcctttttcaccattgatgattgggaagttagcatctggagagatagcaaaatcaggttttggttcaacttctagataacggttgataccaacccattcactttcttcgtcagtcccgaaaatgaagtggacttttttgtttaatttaatatcgttgtcttttaataatttaagcgcatagtatgctgcaattgatgggcctttgtcatctgatgaaccacgggcataaatcttgccgtctttgataactggttcaaaaggatttgtttcccaaccgtcaccggcaggaaccacgtcaacgtgacctaaaataccaaaaatttcgtcgccactaccaaattcaatccggccagcaacgttttcgatgtttttagttgtaaaaccgtcacgatcagcaattgctaacatttgtagcaaagcatcacgagggccagggccaagcggtgcatcgtcttctttatgttcaacgtcacgcgcgctattaatcttgagtaaacttgttaagtcggtaagcatttgatccttatactttgccgcttcttgttgccaattcaatgtcattgcagtcccagctttctttgttaaattttaaccaaggtgcggttaatctaaaattaggataacctcattctagcatatttgctcacaattaaaaagcgcttcctactaaaaaagaacggctgttaacaattacttttaacggtcgttcttttattaatgtatctattatgtgaaactaatctcaaatatgaattagttcgattttctcataatacgcaaggcatttaaaatggcaattagggttacgccaacgtctgcaaaaacggcttcccacatggttgcaatgccaaatgcacctagtaataagaagattgctttaacgatgagcgcaaaagcaatgttttgccagacgattttgcgggtgaaacgggcaatatcgatggcagttgctaacttagttggttcatcggacatcaaaacgatgtcggctgcttcaatcgcagcgtcggaacctaaaccgcccatcgcaacaccgacatcggctcgagcaagaacgggggtatcattaatcccgtcaccaacgaaggccaccttgccgttttgcgcacggttatcagtcaggctggctaaagtagccactttgtcttgaggaagtagttcactttgataatgatcaattcccaatgattggctgacttgtttagcgattgcgtcgttatcaccagttagcatcatcgtttggcggatgccgacttttttcagttgcgcaattgctgtggcagcatcttttttaagctgatctgaaataacgaggtaaccaagataatcagtgccataagcgatgtgcaccgcagtaccgacttcagtaggtgtgagtggtgttaacccttgttccttgagccagctagctttacccacttttagggattggccgtcaagagttgcactaacgccgtgaccagcaacttctgtgaccgcactgagtgtttgattgagtggtgcttgattagcagcaatgatggattgtgcaatcggatgtgttgagtgttgttctgctaaagcggctaatgcgagtaaatgtttcggttgatgatcgacagcgtgaattgctgtaacggtaaaactaccttgggttaacgttcctgttttatcgaaaacaactgtccgcacatcgtttaaagcttcgaggtaattgctccctttgaccaggatgccgtttttagaagcagtcccaataccggcaaaaaagccgagcggaattgaaatgactaacgcacatggacaagaaatcactaagaagatgagtgcccggtagagccaatctgagaagggttgtcctaaaaagagtggtggtacaactgctaataatacggcaaagcctaccacgattggggtatagactttcgcaaagcgagtgatgaagttttcagtcggcgctttttggctgctagcattttcaaccaggtctaaaatcttagcgaccgtcgagtcagcgtaaggttttgtgacttgaagggtcaaaagaccggattgattaatgctgccactcaagagggtatcgccaacgttaaatgaacgaggcaccgattcaccggtgaccgcagcggtatcgacaaaactactgcccgcgatgacggtcccatctagtggtactttttcaccaggcttaattaaaatggttgcaccaacttgaacggcttcaggcgcaacttgttggaggccttggctagtttggaggttggcaaaagtcggtttaatcgcaaccaaactagcgattgaatcccgtgagcgattgattgctaaactttggaaatattcaccgacttgatagaacagcattacgccaactgcttcagcgtattcgccaatcccaaaggccccaatggtggcaacggtcattaggaagttttcgtcaaaccattggccgtgaagaatattccggatggctgtccagataatatcgtaaccgatgaggacaaaagcgactagcaacaagctgattagtagcggctgactaagtggtaagacgtagcttcctaatagtaaaaggccgctaatgataattcgaaccaagtctagattaaatttaaatttcttagggggtgtttggcccgcagccggtaatgatttttgaatggtgacatctggttcaattgtcgttaacaattgttgaagctctaattcaaacgcggtggcggcttgatcaccggttaattcataactcagtttttgcgtcgcaaagttaaccgcgcaatcttggacttgcggtaattttttgacgtttgtttcgattttggtagcgcaggcggcacaatcgatacctgctaattgaatttgtgtcattgatgagtcctccttattggttaatgaaccgtcagttcggatctaaatcgttatatttacgaattagatatacatatgagcatatattcatatgttacctataagataacaccacaacctataaaatgcaacccgtttagtttgtagtcgtttagagaaaaagaggctgcagcaaaagttaatttgctgcagcctcttgtaataattagtgctcgttaacgtgcgcgatgacttgtgagaagatgttaatcacatggttgtcagcaagggagtagtaaacttctttgccttctttgcgactcttaacgagctttgcttgtttgagtacccgtagttgatgtgagatagaagattgcgacatctctaaaacgctgacgatatcgtaaacccgtaattctgattggaagagtgcgtacagaattttagcgcgggtcttatcgccaagaattttaaaaagtgttgagatatgatcgagcgtgtcttctttcggaagtgttttttgaacggagcgaatcagttgatcgtggtcgattgtcataatagcctgccttgttagaatttagtgttaaaaaaggaatgttttaatagtaggtttgtggggcggagttgttttggcaattgccgataataagctaatgcaatggttggtaaatcagtattaggatccaattgaatcaatgcttggcgacttttgaaccagccggttgcggtttggagccaaacctgattgccaacatagcgaacggctaatattttgtggcgactattagctagcagctgaccggttttctgggtcggatgcaagggactattccaagtcgcaacagtcatcggattgggtttgatctgggctgttttgcctaccaataaggaagctgcttgggcggtttggccaacattaatcgcatcgcttaatacaaaccggttagtcccaattcgataataggtctgatcggcaaccgtgacggtttgggttacgtcgtagctatgaccagccttagccggtgctttagtgggcacttgttcgtaggggttttcaacggtggttaaatcgtgaacgctattgacctgaccagtcgtttctaaggattcaatctgagattgatcttgggcggcttggtaatgtcggcctagcgcgggataattagtgacaacgccatccacatcgaggttaacgagccagttccaagtggcttgattttcagccatttcattccagacgtagactttttggtggaggtaatgcaattgtttgataatcgtcggcgtcactaattcggaagaaatgttaatcccgtccgcatatttgaagctttcaaatgaaatccgcttgagactacccacgataaaaatgcggggaatctcaggcattagtttttgcatattgattaaacttggtaacgagaaggaatggaccatgatccgcttttgcaggtgatacttttgaatgagcgcaactaatttggcttccatgtcctgcgggttacccttttttgttttcttggtttcaattaagaatttcgcattggggttgttctgatagtgttggaataactgttcaacgctatggacaggttcaccattactcatttttagtgtgcttaatttggcaaacgtgttttgagaaacaatggtgtcgacaccggtgacacgttttagattacggtcgtgcgagatgactaagacgccatcttgtgactcatgtaaatcgagttcgacgtagttggcaccttgcgaaaaggccatatcaatactctggaatgtttcttccggggcattaatgggatcaccgcgatgaccaacaactgtaaagccagataataagagaaagtaaaagcagcaaaagagcacgatgcccagttgtgatttggactttaacaaagttaacggcctcctaattaaatttaaaactactaattaagataccattatttttctaaaaaacctatcatcgtgttagaacccagttataaattaatcgaattattactaaataataattgacaacgcttacattgagcggtatattatgtctgtaaggtacttatgcaattacctttttatcaattctctttctctcttatgccaaccactgtctacggatagtggtttttttgcgtacatattggtaaaatgaacgtaactgaaatcggataagaatagggagtcacactatggcagagaaacaacaagtgtttgatattattgaagaaattacacgcttagacggttcgacgtactatgagttaggcaatatttttatgaatgggcgggcagaacttgctgccaatcgcgggttaattaagggtgtgcggattttgcaattaaacattccacattctaatgccgttcaaacttacgaagactatattaatgagacttatacgatgcccgctgttgattttacagaatgggaagaatgggagaaaacaccggggcctgtcgaagaggcttttaaagaagttttaaaagcaaatcatattggctaggtggttgataaaatgatttattttacagcggatacccatttctatcatgaagaattactcgggatgaatgactttgcgccacgaccgtttgcggatgtggccaccatgaatgagacgattgtgactaactggaatcagcgtgttcaatcggaggaccaggtttacctattaggagacgttgcattagtcccgaataaaccaactgcttttgcgcaagttaatgctttgctcggcgcattgaatggtcagattattctggtgaagggcaatcatgacaaccgtgccttctttaaatatttgaagaagcacgatccgggaacagaggcacacccgcactatcaatttgtcgatgtcggggcgctaattaagattaatcaccggcagtatttcttaacccattatccgctgttactcggtaaagttagccaaacggttaacttgcatggccacattcaccacaacatgctaccaattgctgagaatatcaacgtggggattgacgccccagaacgtgaattattgaaaacaccactaccatttgggacacctttatcagtagcggagattgaagcaatcttgacggcaaaacaaaaggcgttaacgcaattaaaataagaggatgacaaaatggaaactattcacatcttacacacgaacgacttacactcgcattttgaaaattggcctcgaatgcgccgctttttgttagctcatcaagcggcctatcggcaaaaaggtgaaacggtcttaacgtttgatatcggggatgcaatggatcgcagccatcccttaactgaagcaacagacggccagattaatacgaccctgttgaatcaaattggttatgatggtgtgacaattggtaataatgaaggcattggcaatagtcatgcacagttggaacatctatacgatcatgcgaatttccccgtattgttagcaaatctctatgaacaatccacaaacaccctcgctaaatttgcgcaaccgtaccgcattatcacaactgatcaaggcacgcggattgcggttgtcggattaacggcgccattctttttaacgtatcgacctaatggttgggatcctgtcacaattagtgaagaaatgccacaattactggcgcaaattgaagggcagtacgatgtcttagtattactatcacatctgggcttaacaacagatcaatggttggcagaacactatcctgaaatcgacgttatctgcggcgcccacacacatcatctcttaaaagatgggctgatggtgaatcaaacattattaacggctgccgaaaagtacggtcattatattggcgatatcacgttaacactcgatgctaaccatcgcccggttgaccggaaagcccgcactgtcttgacggccgatttaccagaagaagcggcggatgaggctgaaattgcgggttatttagcacaagggcatgcccaattagcagcccaagtggtggccgacttgccagaagcactgccgattgctaccattggagagtcaccgatgatgacggccgggttaaaagcgattgaagcggcaacgcaaacagaagccgctgttttgaacaccggcctatttttaggggggctcgaagcaggtttggtcaccaaagatgacctgcagagtcaattaccgcatccgatgcatttgattaaagtcactttaaagggctacgatttatggcggttagtcttagaaatggaaaaaaatcggttattcttacgtaagttcccgattaaagggatgagtttccgtggtaaaatctttggagacatcgtttatgatgggattacagtggatatgacattacgccgcgtcttttggcatggtcaggagattgatcctgaagctagctatacgttgacgacagttgatcattatctctttattccgtttttcccaaccattgaaattgtcggggagactgaaattatgttccctgattttctgagaaatgcagttgctacctatttaacacaaaaatatcccgtttaagggaagaggaggttcgccgtggcggatacaaaaacaaaaccgaagattgctaagaaggtaactcgggcgcttgaaaaagaaatgattgcagcggctaaacaaccggaagtaccacagcacgtcgttgttaagagtgaaaccatgattgacatcgataagtgtgcctacgaagtggtcgccaattatcgcgatggttttgatgctgaaaagctaaacgaacgctataacgaggttcttgcgaagtacgattatattgtggcggactggggttttgaacaactacgccttaagggattctacaaatcaactaatcgacgggccaataaggatcaattaattgatacactccaagactacctatatgaatattgtaattttggttgtgcctattttgtcttagaacgacaaggtaaaccacagattcgcaacgaaaatcgccgtagtaatcgccggcgaggaccacagaaacaacgccggcaaaagcaaggcttcacggaacgtaaagtaacacctaatcaaaaagtgactaaagaacagccgcaaaaagcggtcacggagaataaaaaatccgttaataagcgccactttaagattcgaccattagagagtaattccccaaaggaaactggaaagtgagtaactaaatgacaaaaacaaactacgcaggctacttaatcgatttagacgggacagtttatcgcggtagcgaacagatgccagaagcacgtgattttattgaacggctccaagctaagaacatcccttttatgtttttaacgaataacaccactaaatcacccgcagcggtgatcaaaaatttagcagataaccatgatattcatgcaaccgaagaccaagtttacaccccatcattggcaacggcgcgttatttgttaaacctaaatggcggtcaagcaaatggcaagacagtgtatgtcatcggcgaaattggtttgaaacaagctttattagatgctggttttagaactaacgaatatgatccagactacgtggtggttggcttagactacgatgtcacttaccacaaatttgaattggcaacgctcgcgattaaacgcggcgctctttttattgggacgaatgccgataccaacttacctaatgaacgtggcttagtgcctggtgcaggttcagtgattgccttagttgaacgcgcaacacaacaatcagcgctttatatcggtaaaccagaaaaaattattatggaaatggcactcgaacaattcgggttaactaaggaccaagtggtaatggtcggcgataactataatacagacatcaaagcgggtttaaatgctgaaatggcaaccttattagtttatacgggcgtttcaacaccggctgatttggcaaaagtcacggcgcaaccaacgcatattatcaatagtttagctgaatgggaagtttaaacggcgtcaaaaaaacgggcaactggctagttttttatctcagtatcgttagtgggagtattctagcggcgattgttatcggttggttgagctatgacttggtaagccgacaacttcatttggcagcgcaaatgcagatgagccaggcgacgttaatgcacgagtttaaccgcttgatgcgttatttggttttgccgggtggacaatcgctagtgttgccacatttcaagatgtcagcaaatggcttggcgcattttaaggaagttaaacacctcttcttattaacggcggtcattttcctggtgacgattgtgccggcacttagaggctggcggcgtgattttaagtcggggaggcaatggcgctatattcgaccgatgcaagtcgcactggttatgccgattgtaattgggttgattgccagtgttagctttgatcgctttttcgtgttatttcatgaattgctatttcgcaacctcgactggcagtttgacccgctgttagatcccattattttagtgttacccgagcagtattttatgctgtgctttatctgcttttttgtcatcctcgaaggtctttttctgattattttgtggcgggcaaagaagtcattgaaaatttattaagaagctctaatgatgattgttttaggattaatattcggtatgctagaaaagtgagtaccgacaaatgaaaatataggagtatcaacatgacgcagttaattgattttgtgttacatatcgacgcgcatctggtcaatattgtcaatcagtttggcaattggacgtatgtgatcttgtttgcgattatttttgtagaaaccggggcagtcatcttaccgtttctaccgggggattcattattatttgccgcagctgctttagcggctcgaacagataatgatttgaatatctgggtatttgccgcattattcttagttgccgcaattgcgggggattctttaaacgaacaaattggtaaaagagttgggatggctgcaaccaagagccgtttcttcgggaagtttatcaataccgaaaagattgaagaggcccaggtcttctttaacaagtatggtggcaagacgattaccattggccgtttcatgccaattatcagaaccttcgtcccatttgtcgccggtggtagtcaaatgtcatttggcaagttcttccgttatgatgttatcgggagtgtcttgtgggtagtcctttgttgtggggccggctacttcttcggaaacatcgcagtcgtgaaggaacatttctcattggtcgttttaggcattattgccgtttcattaattccaatggtcatcaccgcggttaagagccaattaaagagccgaaaagctaaatcataattaaaaaagcgcaccgcctgattctcgtttgagatcagacggtgcgcttttaaattacataatagaagtactgtgaagtggttggcgcttttcagggtagagtttggttaaaagttcggtcacggcaaccggtgcttcaccaaagccgctcgcaattaacttcaccttaccaggataagtggcaatatcgccaatcgcatagacgtttggtaagttggttgccatttgttggttaacactgacttggtggtgatcaagcgttaagccccaatcacggagaatccgtgtatcggagataaaaccgtagttgacgagtaatttatcgacaaccagttgttcttgatcggttgatttcattttattgagtgaaagggcgagttgatgatcaacttctgtgagaccgtcaattaaaaatggtgtcttaatttgaatagaagagttcatcaaagcatcgacactgctttccagaccccggaactgatcacgacggtggatgatatagacttgtttggcgactttttcgagcatgagggcccaatcaatcgcagaatcgccaccaccagcaacggctacggtttgatctttaaactgtgccatttctttagcgaagtagtggatatagttattttcccattcaggttgataatcaacggctagttttcggggcgtaaaggcaccatttccgacggcaacaatcacaccgcgtgtatgcgtcgttcctttagatgtttctaagatgtaagtcccgtcttcttggggtaggatggccttaacagatgtttctaattgggttgtcggttcaaagacggctaattgttcagccaagttagcagtgagctgagcaccagtaatgcctttaaaaccggccacatcgaagatttctttttcaggatagagcgttgcgacttggccgcctagttcagggaggctctcgatgatttgcacatcggctttacgcatgcctgcgtagtaagcagcaaacatgccaacgggaccgccaccgattacggtaatatcaaaaagatggttaggatcaagcataggataacttccttctataagtagacttctgaaatagtatactagaaaaaaattaggaaagcatgttaaaaagaaataataatagtaatttctagattaattcgctattatatactgtgaattaaaaacatttaggaggtctatcatgacatttccacaattagatttagaaaactttgcaggaccaacagcaacttttgataccaaccatggtgaattcactgttgcgctattcccagaacaagcgcctaagacggttgaaaacttcatcggcttagctgaaaaagattactatgacggtatcgtcttccaccgagtaattaacgacttcatgattcaaggtggcgatcctacaggtacaggtatgggtggcgagagtttatggggccaagcttttggtgatgaatttagccaagaacttttcaacttgaacggtgctttatcaatggctaatgctggtcctaatacaaatggtagccaattctttattgtgactaatgaacacatcaacccaagcatgatgtctcaaatgcctggtgctggctatcctgaagaagtgattgcagcttacgaaaaaggtggtacaccttggttagatcacaaacatactgtctttggtcaagttttaagtggcatggacgttgttaatgaaattaatgctgttgaaacagggatgcaagacaaacctgttgatccagtggttatcaatcacatttcaatcaaacactaaaaacgataatcgtgatacccagttgattcgtaaactgggtattttttattggttttttataaagatagggtaggttgtttcagatggcttgccttttaccaaggacaaggattagaatagataggataattaaagttggaggacaatatggtttatcgaattggacaaaaagtgacaggcaccgtaacaggaattcaaccgtatggtgtctttgtggcattagatgaatcagttcaaggcttgattcatatctcagagtgcggtcatggttttgtgaaggcgctagacgagcaatttacagtaggacagcaattagaggtattagtgttagatgttgatgaatacacgcataagattagtttgtcattacgtgcacttcataaggcacaggatctactaccacaacgagcaaagaagcattactggactaaccgtcggattcaaacaggttttgccccgattgcggagcgattaccgggatggactaaagcggcaattgaagaattaaaccaaaggggtaaatagatgagtgctaaagtagcaggaacaatcatgtacaagacaaagcaaggtcaatatgattttttagtgcaaaaacaagccgatacggattacaaaatgttatcaacacataaaaattcggatcaaacaccattagctgcagttttaaatgccattaaagcgacgattaaaattgatgttaatgagctaagattgattaatttagctaatattaaccttgaaggtgagaatgtttcgttttttgtctttcaatggagtgaacatccggccgaattctatgacgaacaattgcaaataattgcagaatcgggctatcagttcgcaaaccctagtgaaatcacggaattgcttgataaactggaagtaacaggcgttccacacctaaattaattcggacaatcactgcatatctattcaaaaatgtccgtttttataactttttacatttttattcaaaaaaatgtaaataaatgcttgacgatatattggaatgttggtatagtagtctatgttgtcagcgtggcaattgataatcatcaaaaacgacgtcatcgaatttaaaagttttgaatatttattcaaaaaaatttaaaaaaagttcttgacaagtcagcacgaaagatgatatattaattaagctgtttcaacacagtagatctttgaaaactgaacaaagttttgataaaccaaatgtgtagggtcgcccttcggggcacaacatatttgcgaagtcaatttcgctagcaaataaattaagtaacaaaacaagagctacaaacttttaatcgagagtttgatcctggctcaggacgaacgctggcggcgtgcctaatacatgcaagtcgaacgcactctcgtttagattgaaggagcttgctcctgattgataaacatttgagtgagtggcggacgggtgagtaacacgtgggtaacctgccctaaagtgggggataacatttggaaacagatgctaataccgcataaaacctaacaccgcatggtgtagggttgaaagatggtttcggctatcactttaggatggacccgcggtgcattagttagttggtgaggtaaaggctcaccaagaccgtgatgcatagccgacctgagagggtaatcggccacactgggactgagacacggcccagactcctacgggaggcagcagtagggaatcttccacaatggacgaaagtctgatggagcaacgccgcgtgagtgaagaaggttttcggatcgtaaaactctgttgttggagaagaatgtatctgatagtaactgatcaggtagtgacggtatccaaccagaaagccacggctaactacgtgccagcagccgcggtaatacgtaggtggcaagcgttgtccggatttattgggcgtaaagcgagcgcaggcggtttcttaagtctgatgtgaaagccttcggctcaaccgaagaagtgcatcggaaactgggaaacttgagtgcagaagaggacagtggaactccatgtgtagcggtgaaatgcgtagatatatggaagaacaccagtggcgaaggcggctgtctggtctgtaactgacgctgaggctcgaaagcatgggtagcaaacaggattagataccctggtagtccatgccgtaaacgatgagtgctaggtgttggagggtttccgcccttcagtgccgcagctaacgcattaagcactccgcctggggagtacgaccgcaaggttgaaactcaaaggaattgacgggggcccgcacaagcggtggagcatgtggtttaattcgaagcaacgcgaagaaccttaccaggtcttgacatcctttgaccactctagagatagagctttcccttcggggacaaagtgacaggtggtgcatggttgtcgtcagctcgtgtcgtgagatgttgggttaagtcccgcaacgagcgcaacccttattactagttgccagcatttagttgggcactctagtgagactgccggtgacaaaccggaggaaggtggggacgacgtcaaatcatcatgccccttatgacctgggctacacacgtgctacaatggatggtacaacgagttgcgagaccgcgaggtttagctaatctcttaaaaccattctcagttcggattgtaggctgcaactcgcctacatgaagccggaatcgctagtaatcgcggatcagcatgccgcggtgaatacgttcccgggccttgtacacaccgcccgtcacaccatgagagtttgtaacacccaaagccggtgaggtaacccttcggggagccagccgtctaaggtgggacagatgattagggtgaagtcgtaacaaggtagccgtaggagaacctgcggctggatcacctcctttctaaggaataatacggaaaaccttgtacatttgcgaaatcaaaactttgtttagttttgagaggtctactctcatcattaaggacgtttttgggcctatagctcagctggttagagcgcacgcctgataagcgtgaggtcgatggttcgagtccatttaggcccattgtaccaatttaatagtttcattatgggggattagctcagctgggagagcgcctgctttgcacgcaggaggtcatcggttcgatcccgttatcctccattgatgacaatagtcatcgtaactttgttctttgaaaactggataataagtaatatattagttttaaaagccgagaaaaacattgcgttttaaagagttttttaataatagaaatatgaattagttcatatcgctaaactcaaataataaccctttaccgtaggtaaagataggttaagttataaagggcgcatggtggatgccttggcactaggagccgatgaaggacggtactaacaccgatatgcttcggggagctgtaagtaagctttgatccggagatttccgaatgggggaacccaatacttttaatcgagtattatcattaagtgaatacatagcttaatgaaggtagacgaggggaactgaaacatctaagtaccttcaggaagagaaagaaaaatcgattccctaagtagcggcgagcgaacggggaagagcccaaaccaagaagcttgcttcttggggttgtaggacagaactttggagttaccaagttaagttgtaatcgaatcagctgggaagctgagtcaaagagtgtgataaccacgtagattaaacaacttgacctccgttctggatcctgagtacggcggaacacgtgaaattccgtcggaatccgggaggaccatctcccaaggctaaatactccctagtgaccgatagtgaaccagtaccgtgagggaaaggtgaaaagcaccccggaaggggagtgaaatagatcctgaaaccatgtgcctacaattagtcaaagctcgttaatgagtgatggcgtgccttttgtagaatgaaccggcgagttacgtttatatgcgaggttaaagtgaaaagctggagccgtagcgaaagcgagtctgaaatgggcgagtgagtatatagatgtagacccgaaaccaagtgacctacccatgtccaggttgaaggtgtggtaaaacacactggaggaccgaacccacgtcagttgaaaatggcggggatgaggtgtgggtagcggtgaaattccaatcgaacttggagatagctggttctctccgaaatagctttagggctagcctcggaatattggatcatggaggtagagcactgtttggactaggggcccgtcatgggttactgaattcagataaactccgaataccattgatttagttccgggagtcagactgcgagtgataagatccgtagtcgaaagggaaacagcccagatcaccagttaaggtcccaaaatttatgttaagtggaaaaggatgtggcggtgcacagacaactaggatgttggctcagaagcagccaccatttaaagagtgcgtaatagctcactagtcgagtgccgctgcgccgaaaatgtaccggggctaaacataataccgaaactgtgggtggacacgtaagtgtccgcggtaggagagcgttctaagggcgacgaagctagatcgtaaggactagtggagcgcttagaagtgagaatgccggcatgagtagcgaaagatcagtgagaatctgatccaccgtatgactaaggtttcctggggaaggctcgtcctcccagggttagtcgggacctaaggcgaggccgagaggcgtagtcgatggataacaggttgatattcctgtactagtttattttgtttgaatgatggagggacgcaggaagctaaggaatgcacacgactggaaatgtgtgtccaagcaataagtcttgagttgagtgaaatgcttgattctttaaggacaagttgcgatggggagcgaaattaagtagcgaagttcctgatgttacactgccaagaaaagcttctagtgagaaataaactacccgtaccgtaaaccgacacaggtggtcgaggagaatatcctaaggtgagcgagtgaactctcgttaaggaactcggcaaaatgaccccgtaacttcgggagaaggggtgctgaccgtcaggtcagccgcagtgaataggcccaaacaactgtttatcaaaaacacaggtctctgcaaaatcgtaagatgacgtataggggctgacgcctgcccggtgctggaaggttaagaggatgagttagcgcaagcgaagcccagaattgaagccccagtaaacggcggccgtaactataacggtcctaaggtagcgaaattccttgtcgggtaagttccgacccgcacgaaaggcgtaatgatttgggcactgtctcaacgagagactcggtgaaattataatacccgtgaagatgcgggttacccgcgacaggacggaaagaccccatggagctttactgtagcttgatattgagtgtttgtacagtttgtacaggataggtaggagccgtagaaatcggaacgctagtttcgattgaggcgttggtgggatactaccctaactgtatgaccactctaacccgcgccacttagcgtggcgggagacagtgtcaggtgggcagtttgactggggcggtcgcctcctaaagtgtaacggaggcgctcaaaggttctctcagaatggttggaaatcattcgtagagtgtaaaggtataagagagcttgactgtgagattgacaaatcgagcagggacgaaagtcggacttagtgatccggtggttccgtatggaagggccatcgctcaacggataaaagctaccctggggataacaggcttatctcccccaagagtccacatcgacggggaggtttggcacctcgatgtcggctcatcgcatcctggggctgtagtcggtcccaagggttgggctgttcgcccattaaagcggtacgcgagctgggttcagaacgtcgtgagacagttcggtccctatccgtcgcgggcgcaggaaatttgagaggagctgtccttagtacgagaggaccgggatggacatacctctggtgtaccagttgtgccgccaggcgcatcgctgggtagctatgtatggcagggataaacgctgaaagcatctaagtgtgaagcccccctcgagatgagatttcccattcctttatggaagtaagacccctgaaagatgatcaggtagataggctaggagtggaagtacagcgatgtatggagcggactagtactaatcggtcgaggacttaaccaaaggtgcaatgtttggcttttgaaatgaaatattacttattatgcagttttgagagaacgaagttcttctcagtgcgcaagcacaaaatagtgtggtggcgatagcaagaaggatacacctgttcccatatcgaacacagtagttaagcttcttagcgccgatagtagttggtgggaaactacctgcgaggataggacgttgccacgctatatttaatggaggtttagctcagttgggagagcgtctgccttacaagcagagggtcacaggttcgagccctgtaacctccattgagtcgttagctcagttggtagagcatctgacttttaatcagagggtcgacagttcgagcctgtcacgactcatcggccaagttacacgccaaaatgcgggtgtggcggaattggcagacgcgctagatttaggttctagtgtctatatagacgtgggggttcaagtcccttcacccgcattcaattgaatattcaatgaaagttatcttattatgccgacttagctcagttggtagagcatctgatttgtaatcagagggtcgggcgttcgaatcgtctagtcggcattaagatgcggaagtagttcagtggtagaacatcaccttgccatggtgggggtcgcgggttcgaatcccgtcttccgctttcattatgattaagccggggtggcggaactggcagacgcacgggacttaaaatcccgcggtaggtgactaccgtaccggttcgattccggtcctcggcatcataatgaaaaatgcacccatagcgcaactggatagagtgtctgactacgaatcagaaggttgtaggttcgactcctactgggtgcatataacgggaaatagctcagcttggtagagcacctggtttgggaccagggggtcgcaggttcgaatcctgttttcccgattgtaacgtaagttacatgttataatttaagttttttggcggtgtagctcagctggctagagcgtccggttcatacccgggaggtcgggggttcgatccccttcgccgctatttttcaaaaaaacttggacctttagctcagttggttagagcagacggctcataaccgcccggtcgtaggttcgagtcctacaaggtccatcgtttggtgagattttgtaggtggttataatatttttatattatcgcgggatggagcagtctggtagctcgtcgggctcataacccgaaggtcgtaggttcaaaccctactcccgcaattggtcgcatggtctagctggttaggacgcctgcctgtcacgcaggagatcacgggttcgagtcccgttgtgaccgtttcaaaatggctcagtagctcagttggtagagcaatggattgaagctccatgtgtcggcagttcgattctgtcctgcgccatatcatgaatatgcgggtgtagtttagtggtaaaaccacagccttccaagctgttgtcgcgagtccgattctcgtcacccgcttttcatgggcctatagctcagctggttagagcgcacgcctgataagcgtgaggtcgatggttcgagtccatttaggcccattatctaaatatttggagaagtactcaagtggctgaagaggcgcccctgctaagggtgtaggtcgggaaactggcgcgagggttcaaatccctccttctccgttttgtatggcccgttggtcaagtggttaagacaccgccctttcacggcggtatcatgggttcaaatcccgtacgggtcattgtaacattcatagtttttatggagaattacccaagtctggctgaagggaacggtcttgaaaaccgtcaggtgggttctgcccacgcgagagttcgaatctctcattctcctttatattatcgcgggatggagcagtctggtagctcgtcgggctcataacccgaaggtcgtaggttcaaaccctactcccgcaatttggtcgcatggtctagctggttaggacgcctgcctgtcacgcaggagatcacgggttcgagtcccgttgtgaccgtttcaaaatggctcagtagctcagttggtagagcaatggattgaagctccatgtgtcggcagttcgattctgtcctgcgccatttttggaggagtagcgaagtggctaaacgcggcggactgtaaatccgctccttcgggttcggtggttcgaatccactctcctccatatttatagggatatagtttaaaggtagaactacggtctccaaaaccgtcagtgtgggttcaattcctactatccctgtttatattatatgttgcataaacattgcgactatggtataattattcatgttaataatggcggtattggtgaagtggttaacacatcggtttgtggatccgacacacgtgggttcgattcccacataccgccttttattattgggctatggccaagcggtaaggcaacaggttttgatcctgtcatgcgttggttcgaatccagctagcccaatttcaaggacaggatttgttcttttatggcggtatagccaagtggtaaggcagaggtctgcaaaacctttatcaccggttcaaatccggttaccgcctttgcgtttaggcgctaaccttaaacgttctgtaagatgccggtgtggcggaattggcagacgcgcgggattcaaaatcccgtttcctcacggaagtatcggttcgaccccgatcaccggtataatggattattatacaagttttaaaagccctaaagatagggcttttttgttgtctaaaaataagttattgtctggcatgaaagcggtatgatacgacagggatatactaagtacatcaaaagggtgattgtgatgaagaagtggggctttttacttagcggtggttttctagtagcaattattgtaggaatattactgataaatcagcgtccaaaccaagcaagacaacaagcaaatcgtgtccatgacagtgcaccaactttttatttacatgggtatggtggctttggtcgttcgagcgatagtatgattgcggcggcagaagagcgaggtagggctactaaggtattaaccgcaattgtcagtcggacgggacaagttgaattagaggggcattggacaggcaatacaacacgaccgattatccaggtgatttataagaataatcgcaatgccaattaccggcaaaatggtgaatggttcaaacgggtattgattgcggttaaccggcagcatcattttaaacaatttaatgtagtcgctcattcgatgggtaatttaacattagctttctatctggcaaataatgctcagaataaaaaaatgccacaattaactaagttcgtttcgattgcggggcactatgctggtattatcgggatggatgatcgtgcaaatcaaaatcatctggctaaaaatggccgcccacagcagatcaacgccacttaccggcaactaatgggattgagacacagattacccaaaaatcaaattcaatacttaaatatttatggggacttatcagatggtagtgattctgatgggcgtgttagcaatgtctcttcacaatcgttgcgatatttagtggcaccaagagcaaaatcatatcaagaagttcaatttaagggctcgaatgcccaacatagcaaactacatgaaaacgaagctgttaataaagcggtaatcgatttcctatggtaattaaaaaaacagcaacatcgacggtttatgagtcggtgttgctgtttttttgttctaagcggtattctttagcggcggttattaaagtccctaataaggcttgttgagttgctgagaagagttgtgtcttacgagaggctaatgaaatgtagaaggtgggttgcggttggtcaagtaagtctaaagtaattaagtcatcagctggtgtgatggctgtttcagttagaaagccaattccgacgttttcatggaccatacttttaagaatactaacatcgttggttcggtaaataatatcagggttcatttgattcatcgtcgaaagcgtatcaaaaacgacaggatgaacgaatccctccgctaacatgataaaattttcattggctaaatcacgaaaagcaacttgtttcgcgtttgcgagcgatgattttggactgacaacgattttaaagtgatgttgttcgataatttcagccgttaaggcatcattttctagtggcgttgccgagcccagtaaagcagcatctaaacgcccggcttctaaacttgccagtaattcggtagaaccaccgtcaaccgttgcaaaatgttgaatactcccagccttgactaatttctgcgctaatttagagaaataataggtgccaatgataggtggcaatccaaaacgaagttcagtggcagacaaattttgcatatcggtagttgtcaattgaatttcatttagaatttttaccgcatgtcgattgagttgttcaccgctatccgtaataataatcgattgatgcgactggtcccgacggattaatttagtctcaaattctgtttctaagcgcttaaccgcataagtgatggtcggctggctaacgccaaattggtcagcaactgccgtaaaattttttaatttaattaaagccacaaaatattctaaatctttaatcttcatagaaactcctatttaatgcgatttgaaaaactcatataaatctattttatcacagttgtaagttttgactatcaaatgttgaagcgtgtatagtgaccaacatgatataaaaagaaaaggagattattaatatgaaagcacaacaaattttaaatgatccatttttaaataaagggaccgcttttacggctgaagaacgtgctcaatttggtttaacggggatgttaccaccccacgttcaaacaattgacgaacaagttaaacaagcttatgcccaataccaatcaaaagcaaacatgcttgaacaacggattttcttaatgtcaatttttaatgaaaaccgggttttattcttcaagttattcagccaacacgttgctgaattcatgccagtggtttacgatccaacgattgctgacacaattgaaaactacagtgctttatatgtgaatccacaacatgcagccttcttgtcaatcgacgatcctgattcaatgaagacgactttagccaacgctgctgatggtcgcgaaattaaattaatcgttgttactgatggtgaaggtattttagggattggcgactggggaacacaaggtgtcgatatctcagttggtaaattaatggtttatacagctgctgccgggattgatcctagtcaagtcttaccagttgttttagatgctggtacaaaccgtgaaagtttattaaatgatgaattatacttaggaaactggcatgaacgtgttcgcggcgatcgttactacgatttcgttgatcaattcgttcaaacagctgaagaattattccctaacatgtaccttcactttgaagattttggccggagtaatgctgctaacatcttgaacaagtacaaagatcaaatcgtgactttcaatgatgatatccaaggaacagggattatcacattagctggtatcatgggtgcattaaatatctctggtggcaagatgaccgaccaagtttacatgagctttggtgctgggactgccggtgctggtattacacaccgcatcttcgaagaaatgttacaagaaggtttaactgaagaacaagcacgtagccgtttctacatggttgataagcaaggtctattgttcgatgatgatccagaattaacaccagaacaaaaaccatttgctcgcaaacgtagtgaattcgctaatgcggatgaattaacaaccttagaagctgctatgaaagcaatccatcccacaatcttagttggtacttcaacacaacctggtacttttacagaatcaatcgtgaaggaaatggctgctcacacagaacggccaattatcttcccattatcaaatccaactaaattagctgaagcaactgctgaagacttaattaaatggaccgatggtaaagccttagtggctactggtattccagcggcacctgttgaatacaacggtgtcacatatgaaatcggtcaagctaacaatgctttggtatacccaggtcttggtttagggacaattgcttcaactgctaaagtcttaaatgacgaaatgattagtaaggcagcacattcattgggtgggattgttgatccaacagaacctggcgcagccgtattgcctcctgttacaaaattagacgtcttctcacaaactgttgctaacgctgttgcacaaagcgctgttgaccaaggtttgaataaagaagaaattgctgacgtgcaaaaagccgttgcagacatgaaatgggaaccagaatacaaagcactataatttaaatattaatttggtaggagagtgaaagagttggcagcatttctaacatcattatcaagtgtcgtcgaaatcgtcttagtcattgctttggggttttggctacggagttctaaaaagttcgatgataactttaagggtacaatttcatttttaatcatgaacgttgctttaccattatcaattttcgtttcagttctagataacttaacacgtgaaaagttggtcggtttatctggcggcttaatctacgttttaattagtttcgccctaggttacttagttgcttggttattaacaaaggctttccggattcgtccaggtcgtcgtgggacatttatcaatatgttcgttaatgccaatacaatcttcattggtttaccattgaacttggcactattcggtgacaagagtttaccttacttcttgatctactatgttgctaacactgtttcaacatgggcaatcggtgtcttcttcatctcaaatgatgatcctacaaaagaaaaaggcgctgctaaaggcaaatttaactggcgtaaattattaccttctccattaatcggtttcttagccgcattaatttatcttttaactggtttaccattaccagaacttgttgataagacattctcaatggttggtgggatcgttacaccaatgtcattgatctacattgggattatcttagctgatgctggtttgaaatcaatccatttcgaccgcgatacaatcttagccctattaggtcgcttcgttgttgcaccagcaatcatgattgcgattatgatgttcttcaagaatacaacttcaattccaacaattgaacaaagcacattaattattcaagccgcaacaccaggtttggctgtcttaccaatcttagtcggtcaatcacacggggacgttgaatatgcaacaaacgtcgttacaacaagtactgtcttgttcgtcgtcgttgtgcctatcttaatgcaaatcgttcaattcatctagtttcataataagagcgttagatattccgagtatctaacgttctttttttgtgtataaatgtgtaataatacacaatctcggttgataaacgaggctatctggactacaatgaaagcgtagtcaataaacaagagaggttgattaatatgtcagaaaagatttatacgaaacaagcgccagaaccattaggaccatacagccaagcaattgcaacggataagattgtctttatgtcaggtcaactaggcttaaaagacggcaaacttgcacctgatttagcaggacaaacgaaacaagcgattatgaacttacaaagtgttctaaaagaagcagggctaaccttagaaaatatcgttaaaaccaactgtttcttaaccaacttagatgattttaatgaatttaatcaagtttatgcagaatacttcggtgacattgcacctgctagaagtgccgttcaagttggcaaactaccagctggtgggattgttgaaattgaagccatcgctgttcgataatatttgattgggagttggatcaatgaataaagtagccattatcggtattggtcacgttgggagtacggtggcctataagctcgtttcccggcgcatttgtagtgagttagttttatttgatcaaaagccaaaattagcagaagcagaacgaaatgatttagaagccgggcaagttgatcacacaggttttgttaagattacagctaatgatgaaagtcaattagcaacttgcgacctagtgattttctcggcaggagacattagtatcctcgaacatagtgatgatcggtttgatgaattaacctatacgaaaacagcagtcgcagagtgggcccctaaattaaaggcggctaattttaaaggaatcttattgaacattactaatccatgcgatgtgattacccaatatttacaagctttaactggctttcctaaggaacgcgttttagggacggggacaactttggatacggcgcgcatgcaagttgcagtcggccattatttgaacgttgcgcctaatagtgtccaagggtatgtattaggtgaacatggtaattcacaatttgtcgcttggtctggggtgcatgttggtgggcaaccactagcagcacaattatcgccagaacaattggcacaatttgaagtcgatgctcgccaaggtgcttgggaaattctcagtggcaagggttatacgtcttatgggattgctaatcaagcagcgcactgtgccgcagctattttacaaaatacacggcaagtcttacccgtttctaactttgatgacactgtccaatgctatgttggccatccagcaatggttggtgctgcgggtgtcttacaggattatccaagtcagttaacgacagaagaacaacaaaaatggcaaacatcgattgatacgatcaaacacatgtatgccgctatctaaatgaaaagacgtcatccaaattaatggatggcgtcttttttatggttaaaatagttgtcccaagaggaacatcatgagcggtaccatcaacaaagccccgagtgttgtctcggtcaccaggacagcggcaaaatcagcgtctgtgttataaagccgtgcgacaacgggggcatttgtcatgacgggcatacaagattgcagaatgaagacttgtttcatgagggttggcatgtgacttggatagactaacgcagtcattaataaaggcgcaaagatgaaccggccggccaagacacctagttgatctttgccaaagcgaatatttttgagtccggcgttataaattgaaatcccaatgaagagcatggatagtgggatggtcaggttgccgagataagtgaaggactgtgttaagaaactgggtaagtgccaatccaataagaccaggataacgccgataataaagccaattagtggcgccgagaaaaccttctgtaaaatagttttaagagataggccgttctgaacggtaccatctcgttgaattaagtaaacaccaagggtccaaaaaatagtggtattagccatataatagactaagacaaaggggagactgcgctgaccaaagagggctaggttaatcggtaagcctacaaaaaccgtattggaattgaaaaacatggattcgaataagccacgtcgactggcatcgactttaataagtcgtgcgacgataattgaaatcccaaataaaagtaacattgagataactggaaaacggagattaggaagtaaagtgactaattgattatgtgaaaagtccttagtgattgaaataatcatgtacggtggtagagcaacttgtgtcacaagtttagcgatgagcgcggtactttcttcattaaaccaatgccgtgcagccaaggcataaccgaccacaatcatgataatgataataaaaacaccggcactactattaactaaggtttgcataataagcttctttctatttgaaaatcgttctgctattagtataaaacgattagggatgacttaaaagcaactctattaaggagatatttaagtaatgggctaaatagttcgtgttttgatattgatatcgaataaagggtggtatttattggttaaatcacgtataataaatagaaataaatcggaataggggcgaaaatattgatttcaactgaaacaacattagcaggcattcattttgacaattgtttaatgaatgcagcaggcgtttattgttatgatgcagatgaactaaatcagattcaaaaatctgcagcaggcacttttgtaaccaagagtgccaccgtggtcccaagggcgggtaatccggaaccacgctatttatcaacaccgtggggtagcattaactcgatgggtctccctaataagggcttaccttattatctcgattacatttctcaacaacaagccctttttcctgagaaacgatattttcaatcaattactggtttcaatatctctgaggacgaaacgctattgaagcaaatcacagattctgattttaatggtttagtggaattgaatctttcttgccctaatgtgccaggaaaaccacaaacgggttatgattttgaaacggttgaacaaattttaacgcgggtctttgaagtgtatgacggaccgttaggcgtcaaattacccccttattttgatattgttcattttgatcagatggcggctattttaaaccaatttcccttggcattcattaattctgtcaatagtatcggtaatgggctcacgattgatgctaccaccgaacgggttagcattaaacccaagcatggttttggtgggattggtggcgactatattaaaccgacagcgctcgcgaatgtccatgccttttatcaacgattgaaacctgagattcaaattatcgggacgggcggcgtcaagtctggacaagatgtttttgaacatctattatgtggtgctagtatggttcaagtcggaactgcactttataaagaaggcccacagatttttgcccgcttaacagcagaattacaaacaatcatgcaacaaaaagggtataataaaatagccgattttaagggcaagttaaaatatttagattaaagagagtgattaacaaaatgcaatataaatatttatttttcgacatggataataccttatttgacttcgatgcggatgaagatcaagcattagaacggctatttaacgcccaagacattgacttaacgagtgatattaaagcaacttatcaaactttcaatcaagggttatggcgccaatatgaacaaggagaattaacccgggaaatattattgaacacccgctttgcgactttttttaaaaagcagtttaataaagtggtcgacggtcaacagttatcaagtcaatacttagataatttggctttaggccacgatttaatgccacaatccgaagaattattgcttggtttgcaagcgcaacacgcgaagttatatatcacaacgaacggtgtggcgcgcacacagtaccaacgcctgcaagattcggggttagcgcattatttcgatgccatttttgtatcggaagaattaggttatcaaaaaccggacccagcttattttcaaactgttttccagaaattagaaactgttacaatgactcagtcattaattgtaggtgattcactgacttctgacgttcagggagggcaaaatgtgggggtggcaacagcttggtacaatccaacaggtcaaattaatcatgatcaggccttacagccaacacatgaaattaaacaattagcagaattattgacgctttaagcgtgacaatcaaagcgccaaccgttagagtgcgtaaaaagatggagtgacaagagatgaaaaaacaacgttattttaggattagtttaggctggcggattttaattggcatcgcacttggcttagttgccggtgggattttctaccaaaacaaagctgcaattgcggtgatgcaagcgataggaacgttgtttattaatttaattaagatgattgtattgccaatcgttgtttcttgtttggtagtaggcatcgccaaaatgggcgatatcaaaaagttgggtcgaattggcggcaagacacttttatattttgaaatgatgaccaccattgccattgcattggggttgaccgtcggtaatttgacaaagccaggggccttaatcgatattcatagtttgagtcaaggttcaattggccaatatacagcggcggctgagtcagctagcaatcatggcttgggcgatattattatgaatattgtgcccacgaatattttcaaagcccttagtgaaggggaaatgattccaatcatcttctttacggtcttgtttggcctagggcttgcaacatttggcaaacgtagtgaatcgctgattaacgcttttgaaatgatttcagaagtgatgtttaaattgactaactggattatgcaattagcgccaatcggggtttttgccctaatcggtgtgacgattgcccaatttgggtttgatgcattgaagccattggtttatttcctagtgatttgttacttaacgatgattttcttcgttgtggttgtggcggggctagtggcgcgaatttggcacattaatatcttagaactgttgaaagtctttaaagaagaattagtgctatcattttcaactgccagttcggaagctgcgttacctaaagtaatggaaaaaattcaagattacggggttagtcagggaattgcttcttttgtcattcctacaggatatacgtttaatcttgatggatccgcaatctatcaatcattagcggcgctctttttagcgcaagcttaccatgtccaccttagtttaatgcaacaattaacgctcttagtggtcttgatgattacctctaaagggatggccggggtgccgggggcttcatttgtggtattactcgcaacgattacgaccattggggtgccagctgctggtgtggcattcattgctgggattgatcgcttagtcgacatggggcgaacagcagttaatgtcatgggtaattcattagcagccgtgattattgctaaatctgaagatgaattcgatgaagcaaaacgaacgaaatacttagcgcaattaggcgctaaaaaatagtaagactaaatagtagtcagccgataaaaaaaggactaggatgagaattgtctcctagtcctttttactgtctcagggtatagaccggtctggcaatgatttaaattaatgcgacatcttcaaatcagctaccttgaaatgttgtcgtcgttaaatactagagagcaatgtatacttatgaaaacggataacgacggcattatctagaccaatttcatagataacgtaaaaatgattagacagattagagatttgtggtaaaataaacgagtaaagcgttttaaaaagaaaaacgttttggtgtgataatagattgatagggattaatgccataatatttcattataattgttagcgtttttatcagtgtgttattacaactattttataaggaggtttttgtgaatggttggaatcgttattgcaagtcacggggagtttgctaaaggtatcatgcaatctggttcaatgattttcggcgaacaagaaaaagtacaagctgttacttttatgcctaatgaagggccagatgatttgaaagcgcatttagaagctgccgttgcaacgtttgacgcagatgatgacgtcttgttcttagtcgatctttggggaggttcaccatttaatcaagcaaatggcttgttcgaagctcacaaagataaatgggcaatcgttactggtttgaacttaccaatgttgattgaggcatacgcatcacgtttatctatgacatctgctcatgaaatcgcagcacatattattgatgaggctaaggcgggtgttcgggttaaacctgaagacttagaaccaaaagaagcgccaaaggcagaagcaaaacaagctgctaatacagggactcctggtaagttcaaatatgtcttggcacgtattgattcacgtctattacatggtcaagtggcaaccacttggtctaagacaactaacccaacacggattattgttgtttcagacaacgttgctaaagatgaattacggacaaacttaattaaacaagcggctcctgggggcattaaagcgcatgtggtgccaatcgatcaaatgatcaagttagcaaaagatgatcaacacttcggtaaggaacgtgctttattattattcgaatcaccacaagatgcacttagagccgttgaaggtggcgtaccattagaaacaattaatgttggttcaatggcgcactcaactggtaaagttcaacctaatactgttttggcctttgaccaagatgatatcgatacatttgaaaaactaaaggcaaaaggcatcaagtttgatgttcgtaaagtgccaagtgattcaaacggtaatatggatagcatccttaaaaaagcacaatcagaattagacaaacaaaacaataaataattaactatcagaagaaaacggaggattaataatcatggatttgaatttcattcaagtgattttggtcatttttatcgcatttctagctggtgtggaaggtatcttagatcaattccatttccatcagccagtcattgcttgtacattaatcggcctagtaaccggtaacttattaccatgtcttatcttaggcgggacattacaaatgatcgccttaggttgggctaacgttggggccgctgttgcacccgatgctgctttagcatcaatcgcatctgcaattattttagtacttggtggtcaaggcaaagccggcgttacatcagctatcgctatcgctgtgccgcttgccgtagctggtttattattaacaatcatcgtacggacattagcaacaggtatcgtgcacatcatggatgctgctgctaaagaaggtaacttccgtaagatcgaaatgtggcaatacatcgcgattatcatgcaaggtttacggatcgctatccctgcaggcttaatcttagcaatcggtgctggccctgttaaagaaatgttgacagcaatgccagtatggttaacagacggtttagcaatcggtggtgggatggttgttgctgttggttacgcaatggttatcaacatgatggcaactaaagaagtatggccattcttcgcaattggtttcgtacttgcaactatctctcaattgacacttatcggacttggcgcaatcggtatttcacttgctcttatctacttagccctttcaaaacaaggctcaggtaataacggcggtggctcaaatactggtgatccgctaggcgatatcattgacaactactaagaaggaggctgacaaaaaatggcagaacaactaaaattaacaaaaaaagaccgtatctctgtttggttacgttcaactttccttcaaggttcttggaattatgaacgtatgcaaaatggtggttgggcttactcattaatcccagcgcttaagaaattatataaaactaaagaagaacgttcagctgcgttagtacgtcacatggaattctttaatacgcatccatacgttgcttcaccaatcatcggtgttactttagcccttgaagaagaacgtgctaatggggccccaattgacgatgttacaatccaaggggttaaagttggtatgatgggacctttagctggtatcggcgatcccgttttctggtttactgttaaaccaattatcggtgctttagctgcttcacttgctatgagtggtaacattcttggcccaatcatttactttatcgcatggaatgctatccgtatgtcattcatgtggtacacacaagaattcggctatcgtgctggttctaagattactgaagatttatctggtggtattttacaagatattactaagggtgcttcaatccttgggatgttcatcttgggatcactggttaacagatgggtatcagtcaagttcacaccgactgtttcatctgttaaattagataaaggtgctttcatcgactgggataaattaccaagtggtgctaaaggcattcaatcggctttacaacaacaagcacaaggtttgtcattaacagaccataaagtaacaactttacaagataacttagatagcttgattcctggtttagctgcattaggtttaacattattctgtatgtggttacttaagaaaaaggtatcaccaatcgttattattcttggcttattcgtagtcggaattgtctttcatctattacacttaatgtaaaagagtgtgtaagtaggcgtttacgttttgaggattaactggatttgacgaattggggctgaaagcacgtttcaaaaacaaaggaagggctagggcaaatttactttgtcctagcccttcctttttataaaagcgtataatgaaagtaagttcttgggaaatggagtcgatacaatggttcaatcaatcaatacaaaagtcgaattagtcatcaatgcgacctcttttacggccttatcagattacggcaaaattatgattggcgataagggttttgaattctttaatgatagcgatgcccgccagtttattcaaattccgtgggaagaagtcgattatgtgattgcgtcggtcatgttcaaaggtaaatggattccgcggtatgcaattcaaactaagaaaaatggaacttatacttttgcttcaaaggagcctaagaaagtgttacgggctattagagaacacgtaccggctgaaagattagtacaatcgctcagcgtgtgggatgtgattaagcgcgtttttaaacgtcaatcaaaataaagcattattaaaaatagaccttggttgaatgatgattcagctagggtctatttgtttgtcaacgattgtaaaattgcgactccttctagggcgtgctaaaataccatataagattaatttaatgaacatacaagcaaaatagaagaggggattcaaatgggatttgacaaagcgattatcgcgttaaaagcaggcaaaaaagtagtacgaacaggttggggtggcccagaattatttattgttcaagttagtggtgatacgtaccaaggagcagcaatcagtccatatttactgattaaaacaacggaagaaccagcttattcaatgttccaaccaacttcttgtgacgtattagccgaagattggcagttagttgactaatggggcattttacagatttaaaacaaaagacggttttagtcaccggggcggcttccgggattggccaagcacagatgctggcctttttagcggagggggcaaccgtcattgctttagataaagcgccgattacaaaggtggtagacggtttaaaaacggttcaagtcgatgttcgagacgctacccaattaacggagacgttacaaaacttgttagcgacagggcactcatttgatattgtttgcaatacagccggcatattggaccaatacgcgccaacgcttgaaacgagtgcagctgattgggataatctgatggcagttaatttaaaaagccaatttttagtgactaatgcaattttaccaaggatgctggcccatcataagggtgtttttgtgaacatggcttcaattgctggattagtggctggtggtggcggggcggcctatacggcttccaagcacgcgattatcggttacaccaagcaattggactacgattacgctagtcaaggcatccgggcgaattgcatcgcaccaggggcgattgaaaccccgatgaatgctgctgattttacgggcgcaggtgaaatggccaaggaagtggcgcgtcaaacgccagctggtcgttgggcacaaccatcagaggttgcccagttaagtttgtatttagcaagtcaagcatctgattacatccacgggacggtggtgccaatcgacggtggctggcttgaaaaatagtaacattcagatcttaacaggtgaaaaacgcttgtaggacatgctttaatggcatagaggagagaaaaaagttatgcaacagattatattattattggcagtggggattttagccggtattttaggtgcgattctcggcattggtggcggcattatcctgacccccgtgttaacacttgcaattggcctagatatcaagtatgcaatcggggctagcatagtcgccgtgattgccactagttcaggcgccacaattgcttatttaaaagatgatatgttgaatttgcgagtggcgatgtttcttgaaattgcgacaaccgtcggagcaattatcggggccttattaaccggtgttgtcccgaccggctttttattcgttttatttgggagttttttattgttctcgacttacaatatgattcaaaaactgcgtggtaaaaaggccgaagaacatgttggcgcagcaaatgatcagtgggctgagaaattaaatttaaatggtacttattacgatatgcccaaccaaaagcaagttgattatcaagttgaaaaagtacctggtggctttgcgatgatgtttggtgcggggattgcttctggcctattagggattggtagtggggtgtttaaagtaaccgcgatggatacgattatgaagatgccgctaaaaccttccagtgctacaagtaatttaatgatgggtgtgacggcagcagcttcagcaacggtttatttctttagtggcgcgattctaccagaaattgctgccccgttagccctaggaattttagcgggcgcaacagttggttcaagagtgatgcaacatttgcaaccaaagtttattcggatgatttttatcccaattttgctttatatgggactgcaaatggtgcttaaaggattcggggtgcacatctaatgacagatcgtaaaaaagaaatggcgcaaattgaattagtaattggtaaaatcttacgagtgggtgttttagtctcagcgactgtcctcattatcgggatgcttctatttttaatgcatggtggaaccggctatggtgaacaccaatttcctacaacttttacaatgattttccaagggatggctgaattaaaagctggggcggttatcatgtttggcttattctgtttgattttaacccctgttttacgagtggtggtttcaatctatgcttttgctaaagaaggggactatctgtatgtttggatcacggtcattgttttagtgattttaattattgggatgacgattggctttatcaaataaagagtgtgtttcaggcgcttatcttccgaggcttaacaaagagtgacgaatgattgcaacaagcaagcaggcggcattcaaagttaaccggaggaagatgcctgaaaaaacacgtttacactataaaaagcccaggacaagaattacttttgtcctgggctttacttggttattgatcttctaatcctaagatccgttttttcttttcttcgaattcatcatcggtcattaagccgtcttctttcatcttgagataagccataattagttcgccttttttgacgaaacttaagtcttcttcggccggtttctcgatgtaatcgttcattagttgatagagcttttgcaactcatcgttatcagtagcttcaaagctgataatgattttttcaagggcgtggttcggcttttgatagagaatttggagatggccttggcgataagtggcttcaaaaaaacgaacggattttaattttttaaaggcaatctcacgatcgtctttgtcatttttctttaagagtcctgggtagtgaagtgtgagaatttgatcatcataagtgatttcaagtttgcgtggcttcttaatgcgataagtctgcatatgactgctccttttaataaaacttaagtaaaagcaaggacgttcttaagatacaacgtctaaacttacccctatcatagtagataatgggcgtaaatagcaagtgttgccttttgttaaaaaaatgaggtggttaggatgcaatttttcactggtgtgcacaatggcttattactcgcattacccatctggggcgtgttaatcttaatggtaagctactggttatactaaaagacaccgagatgaccgggcggttgtttaggatgtcttttttagataattcagtcttttttaggtcttaagtcggtttttatgctagtatgaatagattacaattaagaacattgattgcatatgatttaattaattactataatagtatcaaatgtccaaagataaggaggaggaaaccaattgaatattgggatatttacggacacctactttccacaagttagcggtgtggcaacctccattaaaactttaaaagaggggctcgagaaaaaggggcactctgtttacatatttacaacaactgatccccatgttgataaagaaacgattgaaccgaatattttccgctttgccagtgtaccgtttgtgtcatttacggatcgccggattgctgttcggggcctttttcatgcctatcaggttgctaaagaattagatttagacatcgtgcatacccaaactgaattttcgatggggtatatcggcaagtttgtcgctaagaatttgaaaattccttgtctgcacacgtatcacacgatgtacgaagattatttacattacgtcttaaacgggaagcttttgcgtccttatcatgttaaacagatgagtaaggcctttttataccacatgtcggggattgtcgcaccgtctgaacgggtttctcaaacgttgaatcggtaccaagtcaaagcgccgattcggattattccaaccggggtcgatattagccggtacgaaaaacaagtgaccttggatgtacgggaatcactaggtctaacgaaagaacaacccgtattgttatcactcagtcgggtcgcttatgaaaaacggatcgatgttattatcgatgcgctaccacgcttggtggcgcagaaaccagatttaatgttggtgattgtgggcgaagggccagcgcgtgaggatttggaagcgcaagtggctaaattagggatgagcgaacacgttatttttaccggtatgattgataacgatgatgtttctaattattatcacatggcagatttattcgtttcagcgagtgattccgagtcacaagggctaacgtatattgaagcaatggccgctgaagtcaaaattgttgtgatggccagtccttatgccagtgaattattgacggatccgtcaattgggacgacttttacaaccgaagatgaaatgttgcatcaaatcttgaattatttgaaccatccgggggcttttgatgacccagcaccacggcaaaataagttgcacgccatctcggcagattattttgcggaacaaatggttcaattttataagcaatcacaagtgttatacgatgaactgaaactagatcaagatgagttgttagaattagaagatatggatactaaaaaataaatgacataattgaagaaactgttgatcataatcagcagttttttattggtcaatgatcattagaaaaagggtcggttatgagtcgaacaaataaaattgtgtttgcagtcatgttagcgattggctgtggcatatttgcttacgagagtcacacattacaattaaatcaattggtggcagatattaggcggttaaaagtcggctggttacttgtcgcactttcatgtatgttaatttcttggttctttgaagcattagtattgcgggtctttttaaagggccggacgacggatttttcactatttaatgccttgcggattccattgattgcgcagctttttaatgcgattacgccattttcttcgggagggcaacctgctcagttggtcgcgttaatgcaatcacgagtagaagctggtcaggcgagttctgtcttattaatgaaatttatcgtttatcagtttatggttttggtcaactttttactgagtatgattattggcttttcacaggtttctaagcattttgggacgctggcgattttaattaatttcggtttaatcgttcacgtcgtggttttagtcgtcttgttgttggtgatgtattacaataaatttactaagcaattggtgcattggttgttaattccggtcagctggtttatttccaaaaaacggatgattgaatggcgtagcgtactattaaccaaaattgatacgttttatgccgagagtctgcaccttaaaaaagaaaagaagaaacttgtcaaaggctgtttactaactttatgccaactctttttctactatagtgtgccgtatttcgtgttattagcgttgggcagtccgaacgtaaactacttagaagtgatggtcttacacgtgatgattgtcatgattgtatcgctgttccctgtaccaggtggttctgggggtgcagaatatagtttcaagactttatttgccacctttacgctcagttcgagtaaactagtgttagccatgttgttatggcgactttttacttattatctaggaatgtttatggggattggcgctttggcggtcaaacctaagttaagtgctaaaaaataggaggttattaacatgcaaccaacaatcggctttatcggtatcggtgtaatggggagcagtatggttaaaaatctattgaaagcaaattactcagtcgtcgtttacaatcgaacgaaacaaaaggcggatgaagtggtcagcttaggtgcaaaatgggcggacacaccagcagctgttacgacccaaagtgatgttgtcttatcaatggttggttatccacaagatgtggaagccatttattacggggatgacggtatttttagcgcggttacaccggataaaattgtcgtcgatatgacaaccagtaccccaactttggcccaaaaaattgcggccacggccagtgaattaggcttgcaagcattagatgctcccgtttcaggtggggatatcggtgctcaaaacggtactttaacggtgatggtcggtggtgatcaagccgcttatgaacaagttaagcccgtttttgaagcggttggacaaactgtgcaacggtttggcgaagccggtaagggccaacataccaagatggccaatcaaattatgattgctggtacaatgactgggatgacagaaatgttggtttatgctcaagcagccggcttagatttaccagccgtcttaaaaacggtcaacggtgggagcgctcaaaattggagcctcgcaaattatggtcctcggattctagcgggcgattatacacctggcttttttgcaaaacatttcttgaaggatttgaagattgccttagaggaatctgagaaaatgggtctcaatttaccagccacacgtcaagctaagaaattatacgcgagattagtgaatgaagcgggccttggcaatgatgggacacaagccttgattaaattatggacagattctataaaataattgcatataaacggtgcagtcgaggcctttttctgataaactggtagatagttattaaaggaggattcgccatgcaatcatcacagttagttgcgattatcaaacgtctggtagcaatgcaagaagatcaaagcgctgaggttcaagaaagacgttttgaaaaggaaggcgatttaaaagcgactgttagctatgatccacaagcacaagcctttgaacttgaagacagtagcacacatcaacaattccaatttgacaatattgatttagtcgcaatggaactatacgatttattagcagactagttaattaaccattgagtatcaaattacttggtggtttttttgctacttggagtggttagcgctttatctaacggctcttgagattcttaaaaatgggttaatatttgaaactgcactcggtttcgtattgatttttaatactgacatgtgtaaactaactgtcagattgtcaatagcttttaacgaagctaaatgacctttaacggaggctattgtatcgatgaaacagattggtcataaaattcaggccggattaagtacgcgctggggctttttcctatttgcggtggctttattctggcttaaaacgatttatgcgtaccaaacaaaatttaacttaggcgtcaaaggcggtatgcaagccttcttgatgacaattaacccgattccaacaaccttattgttatttgggattgccctatttatgaatggccgtaagtcgtacgtgacattaatgattattgatttattaacgtctatttggttgttctcgaatattctctattaccgagaattttctgattttttaacctttaacttaatgaaaggttcaggcgcggtttctaataacctggggaagagcattgccggcattattgaatattccgatttcttagtttttgcagatgtgctgttattattaatcttattggcaactaaaataattaagattgatcggcgtgttttcatgaaacggaatgcttttgcgattactgggttatcagttgtcttattcggcgctaacctagggattgctgaagcggatcgttcagggttattaacccggacttttgataataactatattgtcaaatatctagggatgaatgcttacacggtttatgatggggttaagacgactaagaataatgccattaaggccaatgctgatagcagtagtatgagcagtgttttgaagtatatgaaggataatcgagttgcacctaatgttgaatatacaggggttgctaaaggtaaaaacgtctttgtgattcacttggaaagtttccaacagttcttgattgactacaagtgggataatcaagaagttacgccaaatatcaataagctctatcatgatcaaaatacgttaagctttgataatttctttaaccaagttggtcaagggaagaccgctgatgctgaattaatgcttgaaaactcgttattcgggttacctgaaggggccgccatggtcacacaggggacaaccaatacgttccaagcagcaccagccatcttaaaccaacaaggctacacaacagcttcattccatggggatgtcccaagtttttggaaccgggataatacctacaagtcatggggctatgattacttctttagttcacagtacttcaaagaaggtaaggactataatgttggttacggcttgaaggataagattttcatgcaagattcagcccgctacattgaacaattaccacaaccgttctatgcaaaattaatcacagttacgaaccattatccatacttattggataagaagaaccaatcgattgctaaaaccgatactggtgatgataccgttgatggttacgttcaaacggctaagtatttagaccaagcactaggcgaatttatgacttggttgcaaaagacaggtttggataagaatagtatgttggtcttatacggggatcattacggggtttctggtaatcataagaaggccgttgccaagttattgaagaaggatgaattcaatgacttcgataacgctcagttccaacgcgtaccattcatggtgcatatgcctggcttaaaaggcggcgttaaccatacgtatggtggtgaaatcgatgtcttaccaaccttattgaatctgctaggggttaagaataacgataccattcaattcgggtccgatcttctagcggctaaccgtaatcaaaccgtcgtctttagaaatggggattacgtggcaccagattacacgaaggtcggtagtacttactacgataccaagacaggtaaggaattgactaagatgaccaaagcgcaaaaactccgcgtcctagcgcttagtgaacacgtgacaaaggaactctcattgtcggataaagtcattaccggtgatttacttcgtttctatacgccaacaggctttgaagcaactgataaaacgaagttgagctacaaggttagtgatgctaaggcacaactaaaagctgataagactaaaacgagtgttatccaaaagaacaatggtaaatcgacgatgaatctctatcaaacagatgcacctgaattgaaataaaggtagtaaagccagagtggttaatcactctggcttttttgctgtcttttttcaatcattttacttgtcagcgtcgttaaaaaaaggtacgattacatcaatcaatacacatgataatgattatcaattaagaaaggagtttatctgatatgagtcaaacaattgtggaacagacgctgcgaaagttgaaagtgaacaatgtacgaattacaccgcaaagacaggccgttttggaatttatgattggtacgcatatgcacccaactgctgatgatgtttatcaagcgttagcaggccggtttccgaatatgagtgttgcaacaatttataataacttgcggttatttacagagctaggtgtcatagaagaaatgacctatggcgatgcctcgagtcattttgattttgcgcagactaaacattaccatgccatctgtgatcgttgtgggaaagtagttgacattttttacccaggactagaagatgttgaaatagttgcccagaacttaactggttttatggtgacgggccaccggatggaagttcatggtatctgcccagaatgtcagttggtcaatcgctaattaggtgaatttagtgaatatttagaaaaaagcaaaaaagttgcattttttacttgacgatggctatagatgttggtatagtagtctatgttgtcagcgagataaaagatattcatctgataacgagtgatttatgttaagaactttgaatatttattcaaaaaatatttataaaaagcgcttgacagttcactatgaaagatgatatattaattaagctgtttcaacacagtagatctttgaaaactgaacaaagttttgataaaccaaatgtgtagggtcgccctttggggcacaacatatttgcgaagtcaatttcgctagcaaataaattaagcaacaaaacaagagctacaaacttttaatcgagagtttgatcctggctcaggacgaacgctggcggcgtgcctaatacatgcaagtcgaacgcactctcgtttagattgaaggagcttgctcctgattgataaacatttgagtgagtggcggacgggtgagtaacacgtgggtaacctgccctaaagtgggggataacatttggaaacaggtgctaataccgcataaaacctaacaccgcatggtgtagggttgaaagatggtttcggctatcactttaggatggacccgcggtgcattagttagttggtgaggtaaaggctcaccaagaccgtgatgcatagccgacctgagagggtaatcggccacactgggactgagacacggcccagactcctacgggaggcagcagtagggaatcttccacaatggacgaaagtctgatggagcaacgccgcgtgagtgaagaaggttttcggatcgtaaaactctgttgttggagaagaatgtatctgatagtaactgatcaggtagtgacggtatccaaccagaaagccacggctaactacgtgccagcagccgcggtaatacgtaggtggcaagcgttgtccggatttattgggcgtaaagcgagcgcaggcggtttcttaagtctgatgtgaaagccttcggctcaaccgaagaagtgcatcggaaactgggaaacttgagtgcagaagaggacagtggaactccatgtgtagcggtgaaatgcgtagatatatggaagaacaccagtggcgaaggcggctgtctggtctgtaactgacgctgaggctcgaaagcatgggtagcaaacaggattagataccctggtagtccatgccgtaaacgatgagtgctaggtgttggagggtttccgcccttcagtgccgcagctaacgcattaagcactccgcctggggagtacgaccgcaaggttgaaactcaaaggaattgacgggggcccgcacaagcggtggagcatgtggtttaattcgaagcaacgcgaagaaccttaccaggtcttgacatcctttgaccactctagagatagagctttcccttcggggacaaagtgacaggtggtgcatggttgtcgtcagctcgtgtcgtgagatgttgggttaagtcccgcaacgagcgcaacccttattactagttgccagcatttagttgggcactctagtgagactgccggtgacaaaccggaggaaggtggggacgacgtcaaatcatcatgccccttatgacctgggctacacacgtgctacaatggatggtacaacgagttgcgagaccgcgaggtttagctaatctcttaaaaccattctcagttcggattgtaggctgcaactcgcctacatgaagccggaatcgctagtaatcgcggatcagcatgccgcggtgaatacgttcccgggccttgtacacaccgcccgtcacaccatgagagtttgtaacacccaaagccggtgaggtaacccttcggggagccagccgtctaaggtgggacagatgattagggtgaagtcgtaacaaggtagccgtaggagaacctgcggctggatcacctcctttctaaggaataatacggaaaaccttgtacatttgcgaaatcaaaactttgtttagttttgagaggtctactctcaaactttgttctttgaaaactggataataagtaatatattagttttaaaagccgagaaaaacattgcgttttaaagagttttttaataatagaaatatgaattagttcatatcgctaaactcaaataataaccctttaccgtaggtaaagataggttaagttataaagggcgcatggtggatgccttggcactaggagccgatgaaggacggtactaacaccgatatgcttcggggagctgtaagtaagctttgatccggagatttccgaatgggggaacccaatacttttaatcgagtattatcattaagtgaatacatagcttaatgaaggtagacgaggggaactgaaacatctaagtaccttcaggaagagaaagaaaaatcgattccctaagtagcggcgagcgaacggggaagagcccaaaccaagaagcttgcttcttggggttgtaggacagaactttggagttaccaagttaagttgtaatcgaatcagctgggaagctgagtcaaagagtgtgataaccacgtagattaaacaacttaacctccgttctggatcctgagtacggcggaacacgtgaaattccgtcggaatccgggaggaccatctcccaaggctaaatactccctagtgaccgatagtgaaccagtaccgtgagggaaaggtgaaaagcaccccggaaggggagtgaaatagatcctgaaaccatgtgcctacaattagtcaaagctcgttaatgagtgatggcgtgccttttgtagaatgaaccggcgagttacgtttatatgcgaggttaaagtgaaaagctggagccgtagcgaaagcgagtctgaaatgggcgagtgagtatatagatgtagacccgaaaccaagtgacctacccatgtccaggttgaaggtgtggtaaaacacactggaggaccgaacccacgtcagttgaaaatggcggggatgaggtgtgggtagcggtgaaattccaatcgaacttggagatagctggttctctccgaaatagctttagggctagcctcggaatattggatcatggaggtagagcactgtttggactaggggcccgtcatgggttactgaattcagataaactccgaataccattgatttagttccgggagtcagactgcgagtgataagatccgtagtcgaaagggaaacagcccagatcaccagttaaggtcccaaaatttatgttaagtggaaaaggatgtggcggtgcacagacaactaggatgttggctcagaagcagccaccatttaaagagtgcgtaatagctcactagtcgagtgccgctgcgccgaaaatgtaccggggctaaacataataccgaaactgtgggtggacacgtaagtgtccgcggtaggagagcgttctaagggcgatgaagctagatcgtaaggactagtggagcgcttagaagtgagaatgccggcatgagtagcgaaagatcagtgagaatctgatccaccgtatgactaaggtttcctggggaaggctcgtcctcccagggttagtcgggacctaaggcgaggccgagaggcgtagtcgatggataacaggttgatattcctgtactagtttattttgtttgaatgatggagggacgcaggaagctaaggaatgcacacgactggaaatgtgtgtccaagcaacaagtcttgagttgagtgaaatgcttgattctttaaggacaagttgtgatggggagcgaaattaagtagcgaagttcctgatgttacactgccaagaaaagcttctagtgagaaataaactacccgtaccgtaaaccgacacaggtggtcgaggagaatatcctaaggtgagcgagtgaactctcgttaaggaactcggcaaaatgaccccgtaacttcgggagaaggggtgctgaccgtcaggtcagccgcagtgaataggcccaaacaactgtttatcaaaaacacaggtctctgcaaaatcgtaagatgacgtataggggctgacgcctgcccggtgctggaaggttaagaggatgagttagcgcaagcgaagcccagaattgaagccccagtaaacggcggccgtaactataacggtcctaaggtagcgaaattccttgtcgggtaagttccgacccgcacgaaaggcgtaatgatttgggcactgtctcaacgagagactcggtgaaattataatacccgtgaagatgcgggttacccgcgacaggacggaaagaccccatggagctttactgtagcttgatattgagtgtttgtacagtttgtacaggataggtaggagccgtagaaatcggaacgctagtttcgattgaggcgttggtgggatactaccctaactgtatgaccactctaacccgcgccacttagcgtggcgggagacagtgtcaggtgggcagtttgactggggcggtcgcctcctaaagtgtaacggaggcgctcaaaggttctctcagaatggttggaaatcattcgtagagtgtaaaggtataagagagcttgactgtgagattgacaaatcgagcagggacgaaagtcggacttagtgatccggtggttccgtatggaagggccatcgctcaacggataaaagctaccctggggataacaggcttatctcccccaagagtccacatcgacggggaggtttggcacctcgatgtcggctcatcgcatcctggggctgtagtcggtcccaagggttgggctgttcgcccattaaagcggtacgcgagctgggttcagaacgtcgtgagacagttcggtccctatccgtcgcgggcgcaggaaatttgagaggagctgtccttagtacgagaggaccgggatggacatacctctggtgtaccagttgtgccgccaggcgcatcgctgggtagctatgtatggcagggataaacgctgaaagcatctaagtgtgaagcccccctcgagatgagatttcccattcctttatggaagtaagacccctgaaagatgatcaggtagataggctaggagtggaagtacagcgatgtatggagcggactagtactaatcggtcgaggacttaaccaaaggtgcaatgtttggcttttgaaatgaaatattacttattatgcagttttgagagaacgaagttcttctcagtgcgcaagcacaaaatagtgtggtggcgatagcaagaaggatacacctgttcccatgtcgaacacagtagttaagcttcttagcgccgatagtagttggtgggaaactacctgcgaggataggacgttgccacgcttgattccggtttagctcagttggtagagcgcatgactgttaatcatgatgtcgtcagttcgagcctgacaaccggagtaaatcattttggagagttgtccgagcggccgaaggagcatgattggaaatcatgtaaatgggtatgacctgtttcgagggttcgaatccctcactctccgttatataatgatagtatggcccgttggtcaagtggttaagacaccgccctttcacggcggtatcatgggttcaaatcccgtacgggtcatttttggaggtttagctcagttgggagagcgtctgccttacaagcagagggtcacaggttcgagccctgtaacctccatttttattttaaggtcgcatggtctagctggttaggacgcctgcctgtcacgcaggagatcacgggttcgagtcccgttgtgaccgtcgaagagacggttaaaagcattggtcgtttataacgattggtgctttttttgtgcgtttaaaaagataaattaggctataaaaaaacagccagtctaggctgcttttaaggacttataggaacaaaccagtaatgaaaatgaggtaataaagttcgtgtagataagtattatttttaatgaagcccagttgtgtcgctagtaatagtaattgagcaatcataaacggcaataattgccagcctacgatgattttagtcgcgatgatcaaaagaacggtgattaaccagaggcagtcaccaaccacggtgagcatcttattagttggaatcagttcaaaaaggaagattaatcctaaaaaaagtccaatcttaaccagcaatgcttcgggtaaaaaatgaagcccattgaaaatcaatgttgccaggaagaaatagggcgccaataagaattgacagactaatcgcagccaatgattgttaaactgttttggaaagataaacggcacaagtaccaataaactggtaatcgctagtaaagtaccggcccaaacgagcgaatggcgaccaataattaggctaataaccagcgcaattagtaggccaatagcggctaatgagcgctttaacttactagttgtagaaaggactaagggaatcgttaataatgcgcctaaaagcgcagttagcatgaagtataaatcgagatgcttgggaaaagggtgaatcgctaatcccacaattaagcctaggtttaagtagttaaataagattaaccgagcaggcggattattagcaggtagttttttttgtctaagatagaacatagcaacacctttttcatataatatgactttcatcttaactttttttgaaaagaaggtcaatggcttttgaaatatgtcgtgatttatgctaaggtagtagagttataagaagttcccgataggattcacataccgtgaagaggccttgtaaccgacacatatatagggggaaacatagaaatgcaagaaagacatttatttacttcggaatccgtttgtgaaggccatccagataagattgcggatcaaattagtgatgctatcttagatgcgatgttagcacaagatccacaagcccgtgttgcttgtgagacaactgttacaactggattagtattggtcgtgggtgaaatttcaacgacggcttacgttgatatccaaaaggttgtcagagaaacaatcaagaagattggttatcgtgatggccaatacggttttgatggcgacaactgtgcggtgattgtagcacttgatgaacaatcaccagatattgcacaaggggtcgatgattcacttgaatcacgtgagaaggatgaagatccacttgataagattggtgcaggggatcaggggttaatgtttggctttgctgtcgatcaaacacctgaattaatgccattaccaatcgccttatcacatcgcttgatgcgtaaggtcgctgaactacgtaagagtggtcagttagcctatttacgaccagacgcaaaagcacaagttactgttgaatatgatgaaaacgaacaaccaaaacgtgttgataccgtcgtcattagtacacaacacgatgaggatgttactttagaaaccattcaaaaggatatgctagaacaagttattaaaacggtcattccagctgaatatttggatgataagacaaaatacttcattaatccaactggtcgcttcgtcattggtggaccgcaaggggattccggattaactggccggaagattattgtggatacttatggtggttatgcccgccatggtggcggtgcattctctggtaaggatgcaactaaggttgatcgttctgctagttatgcagcccgttatattgctaagaatattgtggcggctggcttagcccgtaaatgtgaagtgcaactagcctacgcaattggggtggcccaaccggtatctgtttcagtgaatacttttgaaactggcacagtgagtgaagaagccattcaaactgcaattcgtgagaactttgacttacggcctgctgggattattaaaatgttagatctacaaagacctatttataagcagacagctgcttatgggcactttgggcgtacagatgttgacctttcttgggaacgattagataaagttgctgctttaaaagcaagtattgctaaactaaatcactaagaagtcaatcgagtaaaagaggcggcctttccttaacttatttaagctaagaaaggtctctttttatgcttagaattaagaggagaacggtgtaatggagaagagaaaaacaaatgtattattagtgacaattgcgttgtttgtcgcgacatttatgacggcaattgaagggacaatcgtctcaacggcaatgccaacgattattagtaacttacatgggatgcgcttgatgaattgggtattctcaatttatttattaacgaatgcgatgatgacgccgatttatgggaagatggcggatcggattggccgcaaaccaatttttattttggggttagtgcttttcgtgattggttcatcattgtgtgggttatccaaccatatggagaccttaatcatttcccgggcaatacaagggttaggtgctggggcaattatgccggtttctttcaccatcattgctgatatttatccaattgaaaaacgggccaaagtcctaggctttaacggttctgcgtgggggattgcctcaattattgcgccacttttaggtgggtttatcgttgataaattaacgtggcattggattttcttcatcaatgttcccatcggtttaattacgattggtttaatttggtatttcttacaagaagaaaaacggacaagtgatcaaccaattgattattgggggagcttctggttaatgatggccctcttaggcctcttgtatggcttccaattaatgggtgagacccacttatcatggggcttattagtaccagcgcttgtgattgccgttgttgctttcattttatttgtccgcgttgaaaagaaagcacaagatcccattatttcattatcattatttaaaaaccggacattcgttgttcaaaatgcagtggctgctttagtgagtggcttcttgattggttttgaagtttacatgccaatgtggatgcaaggtattcttggtttgaaggcttcaatggggggctttgtggtgacaccaagttcaattatgtggatcttcgcttcgttgtgggccggccagttattagtgaaacatgcaccacaacgtattttaatggggagtttagctattctactcggtggcagtattgttttatcactcgtgccacaaacaacaccgttttggtttttcttaatggtcgccgcttgtttagggattggctttgggatgatcattacaacgactactgttacgtcacagagtgttgctggttcggataaagtgggggttgcaacttcatttaatacactgagccgaacattggggcaaacattaatggtgtcagtctacgggattattttaaaccgtcaattggctaaggggattagtggcgattcacggttgaatcaaaacatgcttaacgaattaattaatccggaaacagctgctaaattaccgcaaaacttattaccagatttacggcatattctgtataatggcttacattatatctactttgcttcaatcgtcttaatcttagttgcaatgtggattaatttatcagatcgtcgtcaaaagcaataaaaaaagattggcagttggccaatctttttttatcggaataggacacaaacgccttccggggtctctaaatctttttgacaaggggttaataaaccagtttgggcatcgcgatgataaagtgtgccattatcgctattttgattaacggcaaagagaaattgatcattagcagagaggttgaagtcacgaggaaactcgccatctgttgacatttgttgaatggctgtgagttgttgcccgtcgtcactaatacggtagaccacaattgagttatagccacgatttgaggcgtagaggaattggccgtcttgtgaaatacggatcgccgcaccaccattagcctcatgccaatcatctggcaacattgaataagtttcaacggctgtaaattcaccagtgcttgagtcgtagttaagaaccgtcacttcacttgaaagttcacctaaaagataagccacttggtggttgggatgaaaaacaagatgccgagttccaaaaccaggttcactatggtaagttgcggtcttagttaagtcgccattggctgcgattgtataggttgttagttcatcggtgcctaaatcacagacagctaaccgattatctggtgtgagatcggtataatgaacgtgggcgcttgcttgttctggacgagggccatgaccagtgtgttggaccgtgttggctaatacgaggtggccatcattttgaatggcataaaccagaatttcgcctttatggtaattagcagcgtagaccaattgacgcgcctcatcgacagccacgtatgctggtggggcaccagcggctaagaccgcgtttaaataaaccggtgtggcgccagaaatatcgtaagcagcaatgccgccttgttcgccttctttaaccacagtatataaaatttgttgtttggaaatagccaaatatgaggcattatctaaagtgatataaggtttaatatcagtgattgttgcggtttcaggtgagagcgtaccacgataaatgcccttaccaattcgacgggtataacccccaattaaaacttcttcagtcataaaatagactcccttcatcaaatactatttgagtatagcatattcatgcgaaaacggtttaattaatcgcctaaaaggcgtttgaaaacgttaagtttaagtagaatatgctacaatgagagtatcttaaatacgaggagattcagtgatgataatgcaagcagagatcgtggcaatcggggcccaagcaattgatgccgccgaaccactggttattttattcaacgaacaagcaacaccagcgattaaggcagtcgccctcattcaacgttttacgacggctaatcaatctgaacgacttacgatgacaactcagtcaatcgttgtgattgatggccgaccatatcaagtcacttatgttggggcactggttaatgaaaatctcaataatattgggcatgtcgcgttgatctttgattcagcaccagaggaagatcaactgcaaagtggcctttatttgacacctaaagatgctagtttgcaaggcaaacctgattttaaagtggggacgctaatccagtatcaagaaactatgtaggaaataggtgggcatgtggctgagcataaacaaacgaaggaacaatcttggttttttaagtggtttttaaatcaaaaattaccggtcatcttattgaatgtttttctaatcttgctgattatcctgttggcaactaaattagcatggctattagaacccattcagcaattgatgttgattgttgggttaccgattattattgcggcagttctttattatttaattaacccgctaattgattggttggaacaccgttggcaacttaatcgtgttttatcgattactttgatttttatcgtgattgtggcgttattggcttggggggtggcaacgattattcccattattcaatcacaaacgacgagtttaattaagcaatggccatcgtattgggcgaatattcaaaagcagacgatgagttggtttaatgatcctagttttaagtccttacaaaaacaattagatgatatcaatacggatatgttaagtaacgtctctggtaaagtgaataagatgttaacatcaactgtgacccatatcgggacagccgtcggtgtcgtgacaaacattgtaatcgcaattgtgacgatgccgtttattctcttttttatgctaaaagacggtcatcggttgaaaggctaccttgttaaattcttccccgtccgaattcgggaaactaccagtcaggttttagaagaaattaatggtcaagtcagtcaatatattcggggtcaattgaccgttgctttttgggtagcagtgatgtttacagttggttattggattgttgggatgaaatacgggctaacgctagggattatggcagggctattgaacttgattccatatttgggatcatttctagcattggtgccatcggtcgtcattgcagcttttatctcaccgattttactgatcaaggtcttgttggtgtttgctgttgagcaaacactggaaggacgagtagtctcgccgttggtgcttggcagcaagatgtcgatgtatccagtcacgacgattattgtcttattggcctccggtaagttattcggattggttggtgtcattgtcgggattccagtttacgcaattattaaaatcctggtgacacacttatttgaatggtttaaaaaggtatcaggcttatacgaataaaaaagtgcgcgagaaagcatattaatggtaattaaaaaggcgtggacaaattaatttttgtccacgcctttttgaaactggcttctgtgctaaggatcaaagccaacttgtttcaaacgcatgctctttttaatgattgattgttagtttcatatagtgatgcgggatgttagcttccatttcaccttcgctaatcacttcaaagcctagtttctcatagaaaccaatggcgtgatcttgtgcaaataagatgatgtagggcgtttttgtgcgcttggcatcttcgataatggcttcgattagtttaaatccaaggccctgacctctaaatgacttaattgtggcgacacgttgaattctaaaaccgccatcttttagtacatggacacgtgcggttacggctgggtcttgctcaatgtaaccgacgtagtgaacagtatgatcttcatgtgcatctatttcttgtgtttccggcatattttgttctcgaacaaacaccgttcttctaatgtaagttgcatcacgaaagataacactgttatcaccaagtgtatgtttaatatccatttgtttcacacccttttctgctcaatgtcgacgctgtgaaagcgacaaaggtcattatacagttgttcaggggctgattcaatagataagcgtaaagtttttaggtacctaactaaaaaagaaccactctaaaaggagtggttctttttttgataattggtctacaacatatcaccattaaaaatagaatgccggacaagtacgtaatctactttgcgtagcgctgataagcgcttgccaccagcataagaaattgaagattgtaaatcttgacgcatctcggtcaaggtatcactaatggcgactttataagggactaaaatccgtttgccttcaacattttggtgcgtgcctttttgaaattcagaagctgaaccaaaatattccttaaattgttggccgtcttcttcgacgagttcaccaggagattcagtatgaccagcaaagagagaaccaatcatgaccatgttagcgccaaagcgaattgatttagcaatatcaccgttagtacgaataccaccatcagcaatgattggtttagttgccgctttggcacaccagcgaagggccccaagttgccaaccgccagtcccgaaaccagttttgattttagtgatgcagactttaccaggaccaatgccgactttggttgcatcagcgccggcgcgttctaagtctcgaaccgcttcaggggtgccgacgttaccggagattacgaaacttttaggtaaaacttttttgatgtgttgaatcatatcaatcacgacttgtgaatgaccgtgagcgatatcgattgtaatgtattctgggatgaggttatcttgtgcgagttgattgatgaagtcaaattcatcgtctttaacgccaacactaatggaagcgaataggttgcgttcgtgcatcttcttgatgaaggcagggcgtttttccggttgaaaacgatgcatgacataaaagtagtgattttcggcaagccaaatggccagcggttcatcaataatggtttgcatattagcagggaccaccgggattttaaaagtctctgaaccaaagcgaacagtggtatcaatttcactccgacttttgacgatacatttattgggaataagttgaacatcttcgtaatcaaatacgtccatgaataattctccttaaatacgaacatttatttttatgtacgcctattaattcgtacataacgtattctaacgagttgataatggaaagtcaatcaaaaaacaccgaacaatcccgataatgggttgttcggtgtttgaaaggatttagaaatagcgtttccgccagaaacgaaagcctaaaagggctgcaatgactaaggaaattgcaatggtgacgatccaactgattttgaaattggccagtggtaaggccacgttcatcccgtaaaaactaaaaactaatccagggatggtcagcataatcgaataagatgccaaaaacttcatgacgttattcatgttattattaataattgacgaatacgtatcagcggtttcattgataatcgaattggaaatctcggccatttcaattgcttgttgattttcaatttgaatatcgtctaataaatcaagctcagattcgttgagcatcaacatattagagcgcaccagactagctaataccatcttatcggtttttaacgacatcatgaaataaactaacccgcgttgaatgcccattaaatcatagagctcttcgttacgtagtgacttttgtaatcgggtttcaatacgttcgcgggaacggttgatatcccgcagatattgaaggtatattgtggaaattcgatagagaatttgaaggacactccggcgttgttcctgtggattaaagtttttgatttgattatcaatgaaactctgtaagaaatcaactggcgttttattgatggttaagatgacagaatctgttacaataattcctagaggacttgttttgtagtggaacttatcggcttgccgttcatctttttcaagaatcggcatgttaaaaatgattaacgtcgcattataatctgggtcgtgttcagcacgcgcactttcgtcggcatctaaactataatagatgaaatcggaagggacgtgcagttttttagtcagtaaatcaatttctgcttgcgtgggatcggtaatgttaatccaactattgggttggattttggcatgcttggttagcttctttttagcttcatcgaagcggtaagtatcgagcatgagttcacttccttcgttggtcacttgatatgactaagtttacttgatatttttagaatgtaaaggattgaaataaggagaatttgaattgaaaaaaattgatttagcgcaacaattcttgcaagccaatttaagtgccttgcagtgtccaatttgccaagaggcatttgctactattagtgatcatcaattggtctgtgaagtcgggcatagttttgacctggctaaaaatgggacattgtattttttacctaaacaaatgaagtctgaatatacaaaagaaatgttaagtcatcgccgggcctttttacaagctggtttctttaaaccgttcctagatgaaattgctaagcaattgacggctaatagtcggattctcgatgtcggttgtggggaagggacaccggtttaccagctcgcgcaacaagtgccagtccaatacatcgggtttgatatttctaaaccagcgatccaactggccagtgattacaatcaagaaggttggttttgtgtcgctgatttagcgcggatgccgtttgctgatcagagtttggatacggtcttgaatatcttttcgccatcgcaataccaagaattcaagcgagtgctcaaacctgacgggcagttgattaaggtgattcctaatgctggttacttacacgagctacgagaattattatatcagggtcaagaaaaggaaagctacgatcatggtccagtgttggctttgtttgagcagcatttccctgagtaccaagaaattcaagtccaacaaaaattgactttaacgcccgcaaccttggcagatttagttgagatgacaccgctaacctggacggctacagaggaacaactacaagcgattacgttggacgcgttaccagagatatcattggatgtcacggttttggtgggaaaacaatgagaaattaaagtaattttaaaaaatctgattgcaaatcagaaataagggcgttataataaccacaaggaattttttccctaacttttatcagaattctttttgataaaagctagtgatgaaatgacactaacgtagtttctcgccgtgaataaccgagggactacgtttttttatatgtaaagcaccagtagagctttaccattaaatcgtgtataattaagctgctgaatctttattgaaggaagttagattgtgactaatcatattgttttatacgaaccacttattccagctaatactggtaacattgctcggacatgtgccgggacggatactgttttagatttaatcgaaccattgggctttgaaactgacgacaaacatttaaaacgggcgggtctagattattgggaccaagtgaagattaattaccacaagaacttggacgcctttttagaaacggttccagatcgtaaacatctctatttgatcacgaagtttgccaagcaagcttattctgatcaagatgtgacggatacaagcgtcgatcattactttatgtttggtaaggaaacaaccggccttccagaaacgtttatgcgtgaaaatgaagatcagtgtctccgcattccaatgtcagatcacattcgggctttgaatttatccaactgtgcagcattggtcatttttgaagcattacggcaacaagattttccaggattagaaaagagtcatttgtacgatcacgataaattaaaataggagtgtttctaatgcaaactaaaaaagatcccattagcgttgatgcttttcattttgaccgtgtgtcaccggacgccgaaccacaacaaaatatccaagtcagcttagtgaaaattgatgctgacgatgaatatttacaagaagctgatttaaaagccggtaacatctatcaaatcgttacaccattccaagttattccgcaaggaagtggctttgccgtttctggtcaaatttcacgggttgttcagttgttagatttctttggcacaccagatgaaatcgaacaaaaagaaatgatgaaattatcacgcccattaatcgaatacattgaaaccttgacatatcaagtaacagcggttgctttaaacgaagggattcaacttcaatttacagcgcatgaaacaccagaagaagcataatgattaaataagagaagctaaggggaacttcggttgacccaggcttctttttttgtttgaataaagcctaaaagatgggttaacctgaacagaagttcgtgtataataaggattagatatgtaaggtaaggagattttatggcaactcaaacgaagaagcgtcagaaaaaaacgacgactaagaagaaaaaaacacaacagccggattacacggttaattttgtcggctttttgtttattttaattagtcttttctctgggctgaaattaggctttatcggcgcactatttgcgaatgttttccgcttattcgttggtgatacattcgtcctgggcgcaatcctatttgcaatgctcggtatttacctcttaatttatggcaaacaaccaccattgtggcaacaaaaaacggcgggttttagtttagcctacatcggtattttaatctggctatcggctttcatcttgcaccaacaagcgattaataaccattttatcgcagcaacttggcgcttattatttgaagatttccaaaagatggcagtcacgacggaggtcggcgggggcctgattggggctgtaatttatagtggttcgcattttctatttgcacagatggggacttatatcattgctgtgttagtgacaattatggggctctttatttttatggacattccttttagtgtggttgttaaaagcagtcaacgctttgtccacggcatatttcaagtcgggcgctacactaaatcaggtttggtgaaggccactgaaaagggccgcgatcaagtcagcgcgcttaaagaacagatgcaaaatgcgttgtctgcagttgatgaaaaaacaccaccaaccaaacccgctaaaaaggcggtcccagaaccgaccggcgagcctgagaaaacaggggttgtggtcaacgaaccagcaacctttaagattaacgggcctaaggatttaccaaaaccaattgcaacgcaccaaacaactaatgcgccagcagcggctgaagaagcaccggcagaacaagtgccagatgttgctgaattaacgcatgctgtagcaattgatgaagattatgaaatgccaacgcctgaattattgacgcagattccgccatctgatcagagtgcggaatacgaagcgattgaaaaaaatcaacaggtcttgaaacaaaccttcgattcgtttggcgtggatgtcacggttaagagtgctagtttgggcccggccgttacgaagtatgaaatccaaccggctgttggtgttaaggtgtcgaagattgttaatttggccgatgatttagcgttagcactggccgccaaagacattcggattgaagcaccgattccaggcaaaccatacgtcgggattgaagtccctaatacaactgtctcaacagtttccttcagagagatgatcgaacaagagccaccacatccaggcaaaccgttggcagtgccattagggaaagatatttctggtaaggtaattatgtcagatttggtcaagatgccgcatcttttgattgccggttcaaccggtagtgggaaatcagtggcgattaacgggattatcactagtattttgatgagcgcacaaccccatgaagttaagttgatgttgattgatccgaagatggttgaattaaacgtctataatgggattccccatctcttgattccggtggtgaccaacgctaagaaagcggccaacgcgttgaataaagtcgttaaagaaatggaacgacgctatcaactttttgcggatactggtcagcggaacatgaccgaatataatcagtatattcaaggtcataatgaagatggcgaaatcaaaggtgcggccttaccatatattgtcgtgatcgttgatgaattatctgatttgatgatggttgctagtaatgaagttgaaagtgcgattatccggttagcacaaatggcccgggcagctgggattcacatgattgttgcgacacaacgaccatctgttgatgttattaccgggttgattaaggctaatattccgtcacgaattgcttttgcagtttctagtgggattgactcacgaaccatcttggatggcagtggggctgaaaaactacttggtcgtggggacatgttgtacctaccaatcggggtgagtaaaccactgcgagttcaaggtgcttttatctcgagtcaagatgtggaaagcatcgtttcctttatcaaagcgcaaaagacggctgaatacgatgaagagatgattccaacggccgccgacgagcaccaagaaacggcggatcccgaagatgaatattatcaagaagccgttgaattagtgattaagcaacaaacagcgagtgtctcgatggtccaacgccgctttagagtcggttataatcgggcagctcgtttgattgatgaaatggaaagtcgcgggattatcgggccttctgaaggcagcaaaccgcgcaaggtccttttgcaagaggttccaagcgaacaaccaccaactgaataatgaacaaaaaacggtattagaatcagtagcaggattctaataccgttttttcaaagaaaaaccagagttgttaaaacggtggcgcttttgagtttaacccacttttttggtatgatagtgtctgttacattattcttaaaaagacttaagttgaaagcaagccattttaactgttaaaacagtgaggagcagcaagtatgaatcaaaaagtaatggatggcgtttatttaaatatcttacaaacacaacaattcaaaacaattcgcttttctgtgcaattagtggcaccagcgactaaagaaaccctgacaaaacggtcattactagccagtgtcttatctgctagtagtcaagcttatcgtgatcaggttgcaattgccaatcaactccaagcaatgtatggggctggcttcaatatgaatgcataccggcaaggacaattagcgatttttagtatttcaatgcggattgtcagccctcaatatttacgcgatacaatcgacttacaacaacaagcaattgcctttattggcgaactacttttaaaaccagatgtcattgatcaagcctttaacgcggttacttttgatcgggaaaaagaaaacttgcaacgctacattgacagtgttgctgatgacaaacaaacttatgctgcacttaaattacgggaactttactttacggaccaaacgcaacaaacccctaattatggggatgctgacgtcttaaagacgattacggcgactgatttatatgcttattatcaacagatgattgcaaatgatcggattcaaatgacggttgtgggtaatgtagatgaggaaaaactagcgcttgatttagcgcaactatcactagcaccacggattgtaacgctaccgggtattttttatcaacaagccgctagtgatgcggtccgtgaattgacggaagaacagacggttcaacaagggaagttgaacatggcttatcaactatcggcttatttttaccaaaaagattattacgcggccttagtgatgaacgcattattcggtgggacaccgctatcgttactctttacaaatgtccgtgaaaaggcgagtttggcctattatgcgtctagcaatatcgatgcgttccgaggggctgtcatggttcaaaccggaattgaaagccatcaaaaagaacgggtactagccattatcgaagcgcaacggcaaagtattatcgcgggcgattttacgcaagctatgtttgaacaaaccaaattagctttaatcaatcaatttaaatccagtcttgatagccctggttatttgggccaacagcaatttaatcaaatctttgtccctgaaacggaattagacgcggatcgatttacgaccgccattttggccgtttctaaacaagcagtccaagaacaagccgctaagatgcagctccaagcaatctacttcttgaaaggggtcgacacaaatgaagcttagacaaaatccccgcttaggtgaaacgctctatgaagacaccctcgaaaatgggctaacggtcaaactctatcctaagagtggttatcataagacctatgctattttaacgactgactacggtgcaattgatacgacttttgtacctgcaggccaaacggactatgtgacggttcctgatggaatcgcgcatttcttagaacataagctatttgaaaaggcggattatgatgcctttgaaaaatttgggcaatttggtgccagttcaaatgctttcacgagtttcacgcgaacaagctacctcttttcaacaaccagtcatttgaaggaaaacttggatattttgcttgattttgtacaggaaccctattttacggctgccacagtcgataaagaaaaaggcattattgggcaagaaattcagatgtacaacgatgaaccagattggcgtttattttatacggtgctgggcaacctttatccacaacacccagttcgaacggatattgccggtactatcgaaagtattgcacaaattacgcctgaagaattgtaccaagcgcatcaaactttctatcaacccagcaatatgaatttattcatcgtgggtcagattaatgatcctgaagaagtattgtcgtgggtcagcgctaatcaagacgctaaagattttgcacaaccaagcgacattaatcgctcattaccggaagaagaagctgatggtagtgacattattccgtaccgctctttagaaatgccggtgactcgcagtaagagcatggtcggtatcaaaggactaactgattttgggactggtcaagaagcactagaaatgaaaattaagatgaacctgttattagaattactttttggcgattcatcaacgcaagttcaaaaattatatgaacaagggattttagatgatagttttggctatgaatacgctattcaacgctcatttaacttcattacccttggtggtgacactgatgatgcacagggcttatcggatgcgttgatcaatattttggaacactatcaggagagtcctgatttttcagaagccaatttagccttggtcaaaagagcggcaattggcgaatacttacaagcttttaattccttagaagcaatcgccaatcaatacagcgatgcctttttcgacgaagtgagtccgtttgatgtgctagggttgattgaacaggtaacgttagcagaattggcacaagttgcggccgaattcttcaaaattgaaattatgacagtttgccatatcttaccagaggtgacgcaaaaatgagacgctcagctttaattatcggcgcctcaggtggtatcggggctaccattgcccaacgcttagcagcggacggttggtcgctttatttgcactataaccaaaatcaagaacgtattcaaaaactacaacagcagcttaatcagcagtatgcgcgccaagacttttttgcacttcagttggatttaacgatgggtaccgctgcggttgaccagttgaaaagtcagttgtttcaagtagatgcggttatttttgccgctggcatgacgacttatggcttattgccagcggtctctgccgagcaaattgatgcgttgtggcaagtgcacgtgaagaccccgatgttaattttacaagctttgcagtcgaaattagcccagagcgatttgggccgaattgtttttattggctccatttatggtggtcgtggcagtgcaatggaagtcccttacagtacggtcaagggtgcccagtcagcctttgcgaatgcttacgcgcaagaggttggctcattaggcatcacggtcaacgtgattgcccctggtgcggtagccacgaaaatgaaccaacagtttacagcagacgaacaagcggcgattgccgctgagattccaactggtcgttttgcgacgccagcacagattgcttattgggtccagactttgttagcaccagaagccaattatttaacgggacagacaatttatgttgacggcggttggctaaaataaagaaatcttaatacaatatcattgtggcaatatgctataatgacgagtaatgataatgggataatagtgggtggaattcaaatgaatgaaattggtcaaaaattacgtgaagcacgtattgaaaaaggttatacattagatgatttacaacaaattacgaaaattcaaaagcgttatttaagttcaattgaagagggcgattttgatgcactcccagggactttttatgtgcgggcgtttattaagcaatatgcacaaacggtgggcgttgatagtgaggcgctattagctgaatatcaagataaattgcccaacgcaaaaccagaagaatatgttgaaaagtcagttgaaaatcaaacccgtttaacacgcgaaacaaccgactctaaatgggcaaaatggcggggcttagcaccacaaatcgccgttgttgcggttgtgattgtgattgttggaattgtctacgggattacgctcagtaaccgaggcaaaaaccgggaaacattaactgaaactagttcatcggtaaccgtttcaggtgaccaatcaacagctaagaaagcaagttcagacgataatcaacaaaaagcccaagaaagtaaggccaaagaagcgtctaaagcaagtgaacaatctaaaaaagaagctgacaaaaaggcaaaagaaactaagttatcagcttcaatgacaagtatgagtggttcacaacaagccttcacgattaaaaacttgcctaacaaagctaatacgttgacgttctcagctgaaaacgcaacggcttgggtggggttaattgttaatggttcaaccatttggcaaggttctgttacaccaggaactgagcaaacaacgcaattaccagctggcgtaacccaattctcagttaaaacggggaacggtcctgcaacgaagatgaagattaacgacacagctgttaatttaaatcctaataatgaaacagttcaggtccgaacagtaaactttacagcaacacttgcaaaataataaagagatgtgagaggtctatccgatgaatttaccaaataaattgacgatgtttagaattattttaattcctatttttacaatcctattagcgtttgacgtaccggctggtgacgtaattgttgctgggacggccattccggtcagtgaattgatcgccacaattatctttattgttgcatcattgacggatttgttggatgggaaaattgcacgttcacaacatttggtgactaactttggcaagtttgctgatccactagcggacaagttattggtaatgacagccttcatcttccttgttgaattaggtgctgcgcccgcttgggtagttgccatcattatttggcgtgaattagcagtgaccggtcttcgattgctcttgagccaaggtggcgaggtcatggccgctgccatgcctggtaagattaaaaccacaactcagatgttggcaatcatcttattattcttgcataacgtcttctttgctaatattggcttaccaatggctgatatcatgttatatgtttgtctattcttcacaatttactcagggaccgaatatttcattaaaaaccggggtatctttcaagattcattttctaaataatcaccaaaactggcccgctaaagcaggccagtttttttattggtaaaatcccggcgaattacgtattatataatgaccgaacaaaaattaagaacgtttgttcgattttaacttgcttttatttaacgaaatctgtaaactaagagagtaatgaaatgtactcttttaaggagggtcacttaattggctaaagatgaaagacaagcagcacttgatgctgccctaaagaagattgaaaagaattttggtaaaggttcaattatgcgcatgggtgaaaaggttgatacacaagtctcaacagtttcatctggctcattggcattggacgaagcgctcggagtaggtggctatcctcgtggccggatcgttgaaatttacggccctgaaagttcaggtaaaacaactgttgcattacacgctgttgccgaagtgcaaaagcaaggtggcacggctgcttatatcgatgctgaaaatgcgatggatcctaagtacgcaacagcacttggtgttaatatcgatgacttactcttgtcacaacctgatactggggaacaaggcttagaaatcgctgatgccttggtatcaagtggggccgttgatattttagtagtcgattcagttgctgctttggtaccacgtgctgaaatcgaaggtgaaatgggtgacgcccacgttggcttacaagcccgtttgatgtcacaagccttacgtaaattatcaggaacaattaataagacgaagacgattgcgttattcattaaccaaatccgtgaaaaagtcggcgtgatgtttggtaatcccgaagtcacaccaggtgggcgtgctttgaaattctattcaactgttcggcttgaagtccggcgtgctgaaaccatcaagaatgggaccgatatgattgggaaccgcgcccgcattaaagttgttaagaataaggtagcaccaccatttaaggtcgctgaagttgatatcatgtacggtcaagggatttccaggaccggtgaattggttgatatggcggttgaaaaagacattatcaataagagtggttcttggtactcttatggctcagaacgaattggtcaagggcgtgaaaatgctaaaaactatttggctgatcatgaagatgtcgaagatgaagttcgtttgaaggttagagcagcttatggtatttcagatgtaccagaagaaggtcttcccacaaatgaggatgaacaaataaatattttgccagatgattcaacagaagaataaagcatgaccaacaagagccaggccaaaacttagttttgtactggctcttgttttaggtataaccgaatgattaaggttaaggatttttaaattaagacttatagcgtctactaccgaatgggattactaataagttaagtcatattcgcaattggaccgaaggcggtttgacaatgtctaagggcctaacacaataagcgctggattaaccgaataaacgagtggcaatcagtccggtaaacggttgcaatgctgacactttaagttgacaggcggtttagtaaactataaaataactatgtgttgaaaaattaaacataattacatctttaaaaatttgcaacgtgcttgcaatttaaaatttttgatgatgcggaggtgaaaaaatgaacttagatttgctattaatccttaccgcagtcatcatgttaatcgttggtttagctgttggaacgcttttgcaaaagaaggctcacgaacgtgaaattgatggtgcaaataagactgctaaaggaataattgagttagccgaaaaagaagcggcaacgcgaaaaaaagaaattcttttggaagcaaaggacgaaaatcatcaatatcgctctgaaattgaaaatgaattgaaggatcgacgtggtgaagttcaaaaacaagagaatcgattgatacagcgtgaagaaaccatggatcgtaaagatgcaacgcttgacaaaaaagagcgggcattagaggaacatgaaaatcttttagctgagcaagcgcaacaattaacgaaaaagcaagcagaagtcgaagcgttggttgaacaacaacgaacgaagttacaagagattgctgagctttcacatgatgaagcgcaaaagatcattttggatgaaacgaaacagaacttggatcatgaacgggctgttttaattaaagaaagtgaagagtctgctaaagagcatgcggatcggacagctaaaacattagttgctgaagcaattcaacgtagtgcagcagatatggtagctgaaacaactgtgacggttgtaacactgcctaatgacgatatgaagggccggattattggccgtgaaggtcggaacattcgaacacttgaaacattaactgggattgatttaattatcgatgatacaccagaagcagtcgttttaagtgggtttgatccaattagacgtgaaattgcccggatgactttagagaagttaattcaagatggccggattcatccagctcgtattgaagagatggtcgataagtcacgtaaagaaatggatgaacaaattcgtcaaattggtgaacaagccatttttgatgttgggattcataccatgcatccagatttaatcaaagttttaggacggctacactttagaacaagttatggtcaaaatgtcttgaatcactcaattgaagttgctaaattaacagggattttggctgctgaattaggtgaagatgtgacacttgccaaacgtgctgggttattacatgatatcggtaaagcactggatcatgaagttgatggctcccacgttgaaattggtgttgaacttgcaacgcgttacaaggaaccggcaacggtgattaacgcaattggttcgcatcatggtgatattgaagcaacgtcaattatttcagtcttagtggctgcgtctgatgcaatttcagctgctcgtccaggagcgcgttctgaatcacttgaaaactatattcaccggcttgagaaacttgaaagtattacgaatagtttcaaaggtgttgatcatagttttgcaatccaagccggccgagaagtccgcgtgattgttaaaccagaacaagtcacagatgatcaagcaaccgtcttagcgcgtgatgttaagaatcaaattgaagatcaacttgaatatcctggtcatattaaggtgaccgttatccgagaaaccagaacagtcgaatacgctaagtagttatcagttgatatattttttggggggacaattaaatttgtcaccccctttttttggatttcattaagaaattaagtcctggttgtgtttatgggctgggatttgtataataaagtgaatgttagagaaagtaggcgaatcaaatgatgcccatgtttagaatcatcgttgggttgtttgcgaccatgctcgtttcggccgcaattacaccgctcgttagacgcttagcttttgtcttaggcgcggttgataaacccaacgctcgccgagtgaacaagaaagcgatgccctcaatgggtggtctggcgatttttattgcctttaatgtaggcacttttattctattgcgcggacagtttccgacgcatgaactatttagtatctttttagcagaatgtattatcatcatcaccgggatgattgatgatatcaaagaattaagtcctaaagaaaaaatgttgggaattttaatcgctgggttagtgatttacttcctagcgggtgtacggatgaatatcttaaccattccgttggtgggaacctttaaattaggttggttaagttttccaattacgattttctggatcttagcaataaccaacgcagtaaacttaattgatggcttagacggtttagcgaccggggtctcaatcattgccttattcacgatgggtgtgattgcctacttcttcttagccattactaatgtcagtgtttccattatgattttctgtttagtcgctgcgctaatcggcttcttgccgcataatttccatcccgccaagattttcttaggggatacgggggccttgtttataggtttcatgattgcggtcctatccttgaagggtttgaaaaatgtcacctttattacgttattgattccagttattattttaggggtgccaattacagatacggtttatgcaatgttacgacgaattttaaatcgtaagccaatttcacaagcggacaaacaccatttacaccatcgcttaatgcaattaggcttgtcacaccggcaaacggtactggttatctacggtttggcattagttttctcactgatttcgctattatacccgttgtcaacactgtgggggagtttagcgttaacgattgccgttttgtttggcttagaattatttgttgaatcaattgggttagttggtgaaaatcgtcaaccattattacacttactaaaacgattattaaaaccgagagatgaagaaaaggattagccattggctaatccttttttgatagttatttttgataacgtaagtcgtgaatggcttgggtactgatggggacttcgttaaattggtgttggccaagtgttaatgtgagctgcccattgagcaactcggtcatctgggtttcaaaggcggggacttcttcggtgggcaaccaaaccgttagttgaatatcagttgtatattgaatatcttgggcagctaaattcagttgcgctaagcggttttgaagaaaatcgaactgtgcgtagtcgatggttaaatgacaagcagtttgttcaatgccttggacaatgccaagatgttcgagggcggcggaagtcgcgtggctataagcacgaatcaggccgccagtgcctaatttagtgcctccaaaatatcgcgtgacaacgacgcagagattcgtaagttgcatttgacgtaaaacttccagtatgggaacaccggcagtgccactgggctcaccatcatcgctttgtttttgaatgttagcgggttgtcccaattggtaggcaaagcaattatgattggccttagtatgtgttttacggacctgatcgatgaaggcttgtacagcagcttcatcactaacccgagcgatttgacaaatgaagcgagactttttaatttcgagttcaaactgcccgtctgcttgaacggttaaataactttccatagaagacacctcaaaaaaatagattccgattgcgtatattaatcccaaaggagcaaataaaatgggacaaccagtgattgcctgtggccgccagtttactgcggcccagttagccgatacgcaaaataataattatagtttaccacagattgagcgccgacccgcgtttttacgggtcaagcaacgtttaatctgccaacgttgtcagcaagtggtaccgtcgcaaacttgcttaccagacggccgtcattattgcgcgcagtgtttgttatttggtcgtttagtagaaggggattggttatatacaatccctgaggatcatttatttaaaaccgctacaccgaagttgacgtgggcaggccaattaacagtgtatcaggaacaagccgcccaagcagtggtagcggttattcaagcccataaatggcacgtattaacagccgtgaccggtgccgggaagaccgagatgctttttcaagggattctagtcgcactacaaaagggacagcgagtgtgtttggcagcacctagagtcgcagtttgtctagaactgtatccgcggcttcaagccgcctttgcgacgactagtatcatgttgatgcatggcgagcaaaccgagccctatcgctatacccagttagtgatttgcacgacacatcaattactgaagttttatcacgcttttgatacggtcatcgttgatgaagtggatgcttttccttttgttgataatccagttttagccacggcagttgaacaagcctgtaagcctcagtgtgcgttattatatttaacggctacgccgacaccagccatcaagcgggcgattgctgctaaacaaatgacagttagtgaattaccgcttcgctttcatgggggaatattgccagaaccgcaacggcatgtcgctttcaattggcggccgcgattaaagaagggccggttacctaaacgacttgagcatgattgccagatttgtttaaaaaaccagcagattttgctatttgtaccgcaagtcagattattaaaaccagttgccaatcgactatcaattttattaccggcggtcagaattgagacggtgcacgcaaacgatcctgaacaaattgaaaagatcgcggcgtttagggctcaacaaattcaattaatggtgacgaccactattttggagcggggggtcacatttaaaaatgttgcggttttggtcttaggcgcggaacacatggtgtttaatgaagccgttttggtccagattgccgggcgagcaggacggcataaagactatacccaaaatccagttcatttttattatcaggattatacccgcgctattaaaggagcttgtcggcaaattaaggcccaaaatcagaggggatggcgattacaatcaactgtttaatgtgtcaaaatgtcattattgaaaagccaagtattaaacaactgctagaactaaaaccactacttaaaccgcatatctgtcaaatttgtttacagcagtttgaacctatcagtggcaaccagtgttcggattgtagtcggccactattgacgggcattttatgttctgattgtcagcattggcgacaactttacccccaacagcattttaaaaatcaagcattgtttacttataatcgggcgatgcagttatattttcaacgttataagggccaaggagattatcaattacggttactatttgaacgggacattcaaacgcggtttccagtaaagcccaatgtagcttacgtgccgatcccatccgatgagcaacatcaacaagcacgcggttttaatccagtccaaggcttattcgaaaattgttttccgctaatgtcactcttgaaaaagcgaccaacggaaaaggggcaagcgcaaaaaaatcgtgcagaacgactcgcaagtccgcaattttttgaattaataccacaaaagttacctgataagctacagtcgataacgattctagatgatatttacacgaccggtcgaacgttgtggcatgctcagcaatgtctgcgtgctcgttatccgcaaattacaattaatgcaattactttggccagatagtaatcgttttatttgtctattggccgcaatttatatataatgaacttagtaacaaagccccaataatctatcaattattgggtgacaaataaccaatggggttatttgtgaaaggggagaaatcatatgctaagttttaatgtccgtggagaaaatattgaagtcacagaagcaattcggagttatgttgagaagaaaatcagcaaactcgaaaaatattttgatgaatcagctacagcaactgcacacgttaacttgaaagtctatcctgataaaacagcgaaggtcgaagtgactattccgctcccttacttggttcttagagctgaagaaacatcaccagacatgtacggcagtgttgatctggtaactgataaactagaacgtcaaattcgtaaatataaaacaaaaattaatcgtaaatcacgtgaacgtggtatcaagagtgttgaattagtggtttcttctgaagaaactttaccagaagaaccaatgcaagttgttagaactaaacgtgtttcattaaaaccaatggatagcgaagaagctatcttacaaatgaacatgttaggccatgaattctttatctttgaagattcagaaacaaatggcacaagcattgtttacaaacgccaagatggtcgttatggtttgatcgaaacagatgaataaaaaattttaaataaacatcgtgaagggctcgagacaaacaaaatagtgtttgtttcgagccctttatttattttcagaataagactataggtaatagggttaattttatgcctaatcgcatgtatttgtttaagcatcaggttttaattgactgtaataaatgttagaataaggtgttagtggtccagtaattctaaaatttaattaaaatcatagtgatcagaatttccagaggagaattataatacatggcaaattttctaaaatcatgggtagaaagcgataaacgtgaagttggacgaatgggcaaaattgccgataaagtacaatcttatgaagatgaatacagtaatttatctgacgaagcgttacaagctaagacacctgaatttaaaacaagattagcaaatggtgaaacattagacgatattttacctgaagcattcgcggtcgctcgagaaggcgctaaacgtgtgcttggtttattcccattccgggttcaaattattggtgggattacattacacgaaggtaatatcgctgaaatgaaaactggtgaaggtaaaacgttaaccgccacaatgcccgtttatttgaacgcgcttgcgggtcaaggggttcatgttgttaccgtcaatgaatacctttcaagtcgtgatgcgactgaaatgggtgaattgtataactggttagggctttcagttggtttgaacttaaacgcgaagactcctgaagaaaaacgcgatgcttacaactctgatattacgtactcaactaatagtgaacttggctttgattacttacgtgataacatggttgtttacaaagaagaaatggtacaacgcccattgaactttgcgattgtcgatgaagtggattcaatcttaattgatgaagctcggacaccattgattatttctggacaagcagaaaaatcaacggcactttatattcgtgcagatcgttttgtgaagacgttaaaagaagatgcagattataaaatcgattggcctacaaaaacaattagtttaacagaagccggtattggcaaagctgaagctaattttggtctagataacttatatgacattgaaaatacagctttgacgcatcatttggatgaatcattgcgtgctaatttcatcatgttgaaggatatcgattatgtggttcaagatggtgaagtcttgatcgttgatcaattcactggccgtgtgatggatggtcgtcgttattcagatggcttacatcaagcgattgaagccaaagaaggcgttgaaatccaagatgaaaccaaaacaatggccaacattacgtatcaaaattatttcagaatgtataacaaactttcagggatgactgggacggctaaaaccgaagaagaagaattccgtgaaatttacaatatggaagttatctcaattccaactaaccgcccaatcgcacgtaacgataaatcagatgtgttatacccaacgcttgaaagtaaattccacgccgttgtgaaagacatcaaatcacgttacgaaaaaggccaaccaacattagttgggacggttgcggttgaatcatcagaattactatcacgtttattagacgaaaataatgtgccgcatgctgtcttgaatgcgaaaaaccatttcaaagaagctgaaatcatcatgaatgctggtcaacggggcgctgttacaatcgctactaatatggctggtcgtgggactgatattaaattaggacctggtgtcacagatttaggtggtttagccgttatcggtactgaacgtcatgaatcacgacggattgataaccaacttcgaggccgtgctggtcgtcaaggtgatcctggtgaaacacaattctatatgtcattggaagacgacttgatgaaacgttttggttcagaacgaatcaaagcattcctagatcggatgaagatttcagacgacgatgctgtcatccaaagtaagatgattacgcgccaagttgaagccgcacaaaaacgggttgaagggaataactacgatacacgtaaacaaacccttcaatacgatgatgtcatgcgtgaacaacgtgaagtcatttataaacaacggatgcaagtcattatggcagaagacaacttaaaagaagtgattatgccaatgatttcaagaacggttaaacgaatcgttcaattgcacacacaaggtgatacagcagattggaaccttgaagcaattcatgattttgcaacgacttcaatggttagtgaagaacaattaacacttgagaagttacaaggcaagtcagctgaagaaatcgaagcattattgatgacttttgcagaaaagaattacgcgacaaaacaaaaacaattatctgatgaaaatcaaatgcttgaatttgaaaaagttgttattctccgtgttgttgatgaacgttggacagaccacatcgacgcaatggatcaacttagaaattcaatcggattacggggctacggtcaaatgaatccattggttgaatatcaagaagaaggctacagaatgtttgaagaaatgattagtgatatcgattacgatacaactcgactcttcatgaaggcggaaattcgtcaaaatattcgacgctaattaacgaatggctgaggcaattgacttagccattttttaatggcatgaaatcaaaaagaggttaatcaaatggaattaagtgaagcaagacatttattaaacgaaattgagagtaaaataacgcagttcagggggtctctttgacttagaaggcctgcaagaaagcatcgcacaaaatgaagcacagatgggcgatcctgatttttggaatgaccaacaatcagcgcaacaattaattgatcaaaataatgtgttaaaggaaaagtatgattcttttaaccaattacaggcgcagtttgaagaattgagtgtcactttagagttattacaagaagaacctgatgacgagctacaggcgagctttgaagccgacttagagcagattcaaagtcagatgcgccaatatgaattggggcaattattatcaggtgaatacgacagcaataacgcaatcgttgaattacatcctggtgctggcggaacagaatcccaagactggggtgcgatgttattacgaatgtatctacgttgggcagatgcgcacggttttaccgtagaaacagaggactatcaagccggtgaagaagccgggattaagagtgtcactttgatgatcaagggccataatgcctacggattattgcgctctgaaaaaggggtccatcgcttagttcgtatttcaccatttgattcagccggtcggcgccatacatcattttgttctgtcgatgtgatgcctgaattagacgggtcaattgatatcgaagttcgcacagaggacttgcgggttgacgttttccgttccagtggggctggtggccaacatatcaataaaacctcttcagccgtccgcttaacccatttaccaacggggattgtcgttagttcacaagcacaacgatcacagttgcaaaatagagaaactgcgatgaacatgttgaaagccaagttatatcaaaaagaacaagaagaacaggccaaaaaagcagccgctatcaagggtgaacaactcgaaattggctggggttcacaaattagatcgtatgttttccacccctatacgatggttaaagatcaccggactaattacgaaacaggtaacggtcaagccgtcatggacggtgatttagatccctttatgtatgcgtacttacaatggcaattgagccaaaaaaatccgaattaagcttggcagagggattcgttagagtttactaattttgatgccgaataagtaagacggcatgctataataagatacgactagtgttttttgtagattacatgatgaacaattaaaaaggagtgttacctcagtgattcgaatgacgaatgtgtccaaagaatatccaaatggtgtcacagcaatcaaggatttatccgtaacgattgatgctggcgaatttgcctatattgttgggccaagtggtgctggtaaatcaacatttattaagatgttatatcatcaattaaaggccaccagtggtgaaattgaagtggctggttttgatttagtgaacatgaaagatcgggaagtcccttatttacgccgtaaagtcggtgtggttttccaagatttcaaattattgccacgattgacagtttttgaaaatgtcgcttacgcaatggaagtcattgaagctgaacccgaagtcatccaaaaacgagtacttgaagtgcttgaattggtgggtctaaaagccaaaaatgatcgcttccctaacgaattatctggtggggaacaacaacgagttgctgttgcacgggcaattgtcaactatccagaagtcttaattgctgatgaaccaactgggaacttagatccagaaacgtcagaaggcattatggatattttagaagccatcaacaataaagaaacaattgttttaatggcgactcataacagacaaatggttaacgaacggacgcatcgtgtcttagcgattgaagatggtcgtttagtccgggatgaaaaagaaggtgagtacggctatgaagattagaacgttgaagcgccatttaaatgatagttttaagagtttaaagcgtaatggctggatgtcagtcgctgctgtcagtgctgttacagtcacattactattggtcggcgttgtttttgcgatgatttttaattttaataaaatttcaaatgacatcgaaaatgacgtgcacgtccgggtaatggttgaacgtggtacaaccaacgaccagaaaaaccagttagaaaagaaacttaaaaaaatggcgtccgtcaaaaaagtcacttattcaagtcggaaaaaagaattgaataaggtggttggtagttacggccaatcattcaagatgtttaccggcgacgataatccactttatgatgtttatatggtcagcacaacgaatcccaataaaacgattggggtcgctaaaaaggctaagaaattagcgcacgtttacgacgctacttatggtggtaataatgctaagaaactctttagcgtgatgaagaatatccgcaaatggggcttaggctttgcagcgttactcttattcgtagctgtcttcttaatctcaaatacgattcggattacgattttatcacggcgtgacgaaatcgggattatgcgtttagttggggcaactaatgcctatattcgctggccattcctctttgaaggggcttggaccgggttattaggggtaattgttccggttatcgtaatcgattttggttatgtctgggtttataatcatatggccctcagcatggcttctgccggttactcactcttacgaccaggcatgttcttattccaactcgatttaacaatggctattttagggattgttatcggggccttgggatcagtcgtttcaatgcgtcgtttcttaaaaatctaacaagtaatcatactgatttacaaaaaggaatctcagctttttagctggggttccttttttagcgtttttaagggctaggcagttaacgggacaaaatgctatacttatggggaaagttcggcggtctgttcgacagatgcgattggcatcggtttcaggttggcgggattgaataggttggagggtttatttaatggagatgttcgttaatatgttgcttacctttttcacgacaccattgttatgggtggcgattgtgtttgctttttggttagcgctacatcgtatcaaacatgaacgacagacgtttagaattgccgttaatcctaagtggccagagttgaaactattttggtggcacgggttattagcgggtttagcgctcagttgttgtaccttgttgttaggcgtcacaattaatttaaattggtggttagtctaccaaattgtcgcggtagtagccttatttttgatgccaattggttttgcgggtaacgtcttaatactattaagtgctttattgtatttaatcagtgcaatgatttggccacaatatcaaattctagcgggtaatagtttgctagcagaactgttaattgtagcaggcttaattacaatcctaactggctttttacaaaagtgggatgccactaaggtggtgacaccacacgtcatcactagcagtcgggggcggatgacagcgatgtttacgagccgtcaaatctacttagcacccgttttctttttagtaccaggcactaatcagttacctgattggggcttttggccagtcctacatattggtcagcaatcatttaacatcgtcatcttaccgttgattctcggcttttcagttaaagcgattaaagaattgatgtcagcgttagtgacgcgtgatttgcgaacgcaaatcacatttggtggtgtaattgtggttgccggtatcgttagctttatattcccaagaatcatattgagcacattaagtgttgcgttgattatctgttttatcttacaatggcgattgagacgacaaagccgggcaaataagcaacattttacaaaaccgtatgcgggtattcgtattttgggggttctcgaacaaacaccagctgctaaaatggggttagaagctggggacgtgattgtggaatgtaatggtcaagcaatttcaaacaatgaaaatttctatcaagcgattcaaagccattcgacttattgtcatttgaaagttcaagatcttcagggtgaatatcgcattacggaaagtgcagtttttgccgatgcaccccacgaattaggtgttattttatttccagagaattaattagagaaggatgacattgatgaaaacgattctagtggtagacgatgaaccagcaatcttgacactgttgagatataatctggagcaagaacatttcaaggtaatgacggcaacggatggcgcccaagcgctaacgatggccttacagcaaaaatttgattttatcattttggatttgatgttacccaaactagatgggattgcggtaacgaaaaaaattcgggaagctaaattaaaaacgccaattatgattttaacggctaaggacaacgaaacggataagattgttgggcttgaagttggggccgacgattacgtgacgaaaccttttagcccccgcgaaatcatcgctcgaattcgagccattgaacgccggaccactcagcctattgaacaacccgttgaacaggcgtctgaaacgattgtggtcggtgatttaagtgtggacgaaaccgaagtaatcgcaaaaaaaggcgatcataagttgcacttaacgccgaaagaattcgaattattagtgtattttatgcatcgactcaataaggtgcaaagtcgtgaaaaattattaaatgccgtttggggattcgattacccagctgaaacccgaatggttgacattcaagtgagtcatttgcgtgaaaagattgaagataatccgcgccatcctgtttatctaaaaacggttcgtggttttggttatcaattggaggatcccgcacatgaccaagcatgatcaagtgagattttataagctagccactattttagtggctatttacatagcctttattttgctcattaatttagtcatttatcgccagcaaagtgcgacactcaaagaacggcgtgccgattacgccttaattgtgaaagacgccgactttaagcgtcaaaaatggctacaacaaaataaattacaagttgtgacttcacagtcgccacagcacaccaagttggaacggtcagtggccgatgttttaaatcgtgatcataccacgcgcaattttagtgttaggcaaaagattgatggccgttggtatttagttgcggttcatcaatcgagtcagccaacgtttgtcttattgatgccacaacaacgcttctggcatacctggccggaaatcgccctgacagtgactgttttgtatctactgtttagtttgattgttctctggcaatttaaacggcaacgcagccatttttacgagcacttgaagattttggtggccaatattcatcatattcgctacgaagaaacgccagaaccaattattttccaaaaggacgcgtcattatacgtcctcgcacacgaagtgaaccaattaaacaaggatatgcgtcacatgcgtcaaaagattgccatccaacaaggcagctttgatcggttgattgatcatttaccggtcggagtaatggtgattaatgaaaatcgccaagttgttttgcataacgaggcgatggggcagttattagaaaccgcaatcgagcctcagaagcacccgtatatcgatgatattaagacttatgaattaacgcggatgattgaacatactttccgttatcggcgcagtcaccatcaagagattcaactcattcagaatcgggaacgatttgtcgatgccaatgtagttcagttaaataccgtgaagtctaaatttcaggcgttagtgatcttgtatgatttaactgatattcgccgagttgaacagatgcaactcgactttgttagcaacgtcagtcatgaattgaagacaccggtgacggcaattacaggctttgctgaaacgctgttggcaggggccaaggatgatccggaaactttacagcagttcttgaagattatttacgaagaaagcacgcgcctgacagccttaattcaggatattttggcgttatcacacttggatcgccaagatcaaacgcaagcgcaagatattgggttaaaagcgatagttgaagctaacctagaattgatgcaacaaaagattcaacaaaaagaaattcacgtttccgtcaatataccagagacgttgacgtttaagacgcaaaaaatgaagttaaaccaagtcttgaagaatttgattgccaacggtatcacctataataaacaagcggggtctcttgtgattgcggctcaagtcgatcatcaacaattgataatccgagttgttgattcaggattaggtattccaagtgatttacaagaacggatttttgaacggttctatcgcgttgatcaggctcgggcgacacataagagtgggactgggttaggcttagcgattgccaaggaaattaccgaaagtattggtgggcaattgacggttgaaagccaattaggggtcggtagtcagtttattttaaccttccccttaacgtgatttacaaaatatttacattcaatagtgttagattttacaattcttttctataattaatcaaagggtttaaatggaattcgtggaggattagcatgcgtaaacgtagtgttattggcttattagtcacattcgttgtattactattaactggttgtcaatctaaacaaaatgggcaatcagtcacggcagttgggtcatcggccttacagccactgattgaagcgttagccgaacaatacagtgcccaacattcaggtcagtttattaacgttcaaggtggcggttctgggactggtttaagccagattcaagaaggcgccgttcaaatgggtaattctgatttattcgcagaagaaaaagctggcattaaagcgggcaaattagtcgatcataaagtggctgttgttggtattacaccagtcattaataaaaaaattggcgttaagaatttatcgctgacgcagttagctagaatctttagcggcgaaattacgaactggcagcaagttggtggtcctgatcaagaagtagtcttggttaaccgagcacaaggtagcggtactcgttcaacctttgaacaatgggtgatgggtaatcgcaagacaaaaccagcgcaagaacaagattcaactgggatggtccgttcaattgtggccaatacacccggggcgattagttatctagccttttcttatgtggataacacggttgcaacgcttaaactggatggtgttgcaccagatgatcaaaacgttatgaataacacttggccaatctggtcatacgaacatgtttacactaaaggtcaaccaacgggattaaccaaggaattcttggcctatgttttatcggataagattcaaaataaacaagttagcaaaatgggttacatcccagtcgcacaaatgcaagttgaacggtcgttagacggcacaattacgaaggttaagtaggtggcaaaaatggatccaattaaggcaagtttactgaaaaaatcacgggcggcgaaagccgaaagccgtggaaaattaatcagtttattgtgtatcagtttaatcgtttttatcgttctggctattttttactttgtggcttctaaaggactcgcaaccttctttaaggataaggtcagcctatggcgctttttaacgcaaagcgattggaatccaagtcttaaggatagtcatggtcggccagaagttggggcgctcccaatgattatgggctcgtttggcgtgacgttcttggcagccttattggcaacaccatttgccattggcgccgggattttcatgacagaaatttcacctaaacggggggaaaagattttacaacctgttatggaattactggttgggattccatctgttgtttatggttttatcgggttatcagtagttgtcccaacaatgcgccatatctttggcggcagtggttttgggattttagccggaacctgtgtgttgttcatcatgattttaccaacggtgacttcaatgaccgtcgacgctttgaagagtgtgccacggcactatcgggaagcatcattggcgctaggggcaacgcgttggcaaacaacttggaaggttgttttaaaagcagcgacaccagggattttaaccggggttgtcttcgggatggcacgggcgtttggtgaagcacttgccgttcaaatggtgatcgggaatgcggccttaatgccacataacttgatttcaccagcctcaacattaaccagtgtcttgacaatgggaattgggaacaccgttatgggctcacttgccaataacgccttatggtcattggcactgctcttattattaatgtcactattatttaacttattagttcgtttaattggtcggaagggagcaatgggtcgctaatggatgcaaaaaaatgggataaagttgcaaccggcgttttaacactaatcgctggcttaattgttttattattggcaagtttactaggttatatcttaattcgtgggttaccgcatgtgacttggcaattcttgacgaacccagcgtcaacctttacaaaaggcggcgggattggcgttcaactctttaattcattctacctattggtaattgcgatggtgatttccgtaccactttcaattggtgctgggatttacctcgctgaatacgcgcctaaaaactgggtgacaaatgtcgtccggacggcaattgaagttttaagctctttaccatcagtcgtggttggtttgtttggtttcttagtcttcgttattcaatttaaattaggcttttcaattttagctggggccttggccttaaccgtctttaacttaccattgttaacacggaacgttgaagatgctttgaaatcaattcactttacccaacgtgaagcgggccttgcgcttggtttatcacgttatgaaacagttaaacacgtcattattcctgaagcgttacccaatattattactgggatgattttaggagccggccggattttcggtgaagccgctgctttaatttacacagcaggtcaaagtgcgccttcattagatttcacgaactggaatccaacgtatatcgcaagtcctttgaatccaatgcgtccagctgaaacattggctgtgcatatttggaagattaattctgaaggcattatgccggatgcgacagctgtttcagctggtgcatcggccgtcttgattatcgctgtcctattattcaactggttagcacgggtaatcggcaagcgcgtttaccgcaaaatgacagcagcataggagaagtttatggcagattatgatttaacaaaaacacatatcaaaaaattagcagaacctaaacatgaaattgcgttgtcaactgaagacttaaacgtctactatggtgacaaacgcgcgatgcacgatgcgtcattacaatttgaacgttatcggattacggcgttaattggggcttctggctcaggtaaatcaacgtatctccggagtttaaaccggatgaacgataatatcgctaatactcgtgtgaccgggaagattatgtatcgggatgttgatatcaatagtgatgaagttgacgtttataagatgcgcgaacatattgggatggttttccaacgccctaatccgtttgctaaatccatttacgataacattacgtttgccttgaaacaacatggtcaaaaagataaaaagtaccttgatgaaatcgtcgaaacaacgctgaaacaagctgcactttgggatcaagtgaaagattcattaaataagagtgccttggctttatcaggcgggcaacaacaacggctttgtatcgcacgcgcaatcgcgatgaaacctgatattctattgatggatgaaccggcttcggctttggatcccatctcaacaaacaccgttgaagaaacgttaattcgcttgaaagaacaatatacaattgtcattgtgacgcataacatgcaacaagcagcgcggattagtgattacacagcctttttccattcagggcacgcgcttgaatttgatgaaacccggaagatgtttacccggcctaagattaaagcggcagaagattatgtgtctggtcatttcggctagcatacaaggaggtttgccagttggcgaataaaattattgaatcctcagatgttcatttgttctatggtaaaaatgaggccttaaaaggcattaatatggattttgcagaaaatgaaattacggcgttaattgggccttctggttgtggtaagtcaacgtatctgcggtgtttaaaccggatgaacgatttgattgattccgcaacggtgacgggcaagtttttgcttaatggtcaggatatttatgcgcctgagatggataccgttaaattacggaaggaagttgggatggttttccaacaacctaatccattcccattttcaatttacgataatgttgtttacgggttacgtttatcaggcgtgaaggatcaccgcgttttggacgaagcagttgaaaccagtttgaaacaagctgccgtttgggatgacgtgaaagataagctccacgaaagtgctttgtcactttcaggtgggcaacaacaacgggtctgcatcgcccgggtacttgctgttaagcctaaagtgatcttaatggacgaaccaacatccgcactggacccaatttcgagtacaaaaatcgaaaatatgttgctagaattgcgccaacagtataccattataatggtgacgcataatatgcatcaggcttctcgtatttcggataagacagcattctttttacaaggtgaattaattgaatatgcaccaacgaagaaaatcttcttaaacccaaccgaaaaagaaacggaagattatatcagtggccgttttggctaagaaagaagggaatagcatgcgtagactttttgaagatgaattgaatgaactgcacgttcgtttttccgaaatgggcatgatggtcaatgaagccatctataaatctgttaaagccttcattaatcacgataagcaattagcaagagaagtgattgccgatgatcacaagattaatgaacgggaaacggatttggaacgtaagagtttcgaattaattgcacttcaacaacccgtatcgactgatttacgaattatcgtaaccatcatgaaggctagttctgatttggaacgaatgggcgatcacgcggtatcaatcgctaaatcaacgattcgtgtgaagggcaatacccgtgtaccagatattgaaaaagatattgcagatatggccgacaaagtaaaacaaatggtagaagaagtcttggatgcctacgttaaagaggaccggcgccgagcaattgccattgctgaagaagatacagcaattaacgcttattcggaaaacatttacgatgactgtgttaaagaaatgcaacgtgattcagaaacagttgttggcagcatggattacatgcttgttgccagttacttggaacgaattggtgattacgtcacaaacatctgtgaatggattgtttacttaagaaccggtaaagtcgtcgaattaaattcaaacgacaaagaagacgaattttaaaagagtgttgtaccagccgaatatattctgaggattagcatagaatggcgaatgattgctggaagcaatcatttggtattcgtagctaaccggaagaatatggctgataaaacacgtttaagaaaagagtgcgtttaattctgctcagtttctgagcattaacacagctccgtaaataactgatgcaatcggttgtttgatgagcagggttaagcgcaggaaactagacttaaaaagcacgtttgaactaataatattcgccaatcaaaaaaggggcggtagacaaaagcgattttgtcccacccctttttaatgtttaataaagaggagtcgtaacaatgcaaaagcaaatttacttagcgggtggctggttcacccctaaacaagcagacatggtggcacgcgcccacaaagcgttggcagctaacccaacagttggttatatccatagtccacaagaacatcaatacaaagatgttactgaagataatgatcctaacggtttattcggtggttacgaatgggctaaccaaacttatcaaaacgacatcactgccatggacttagccgatatggccgttgttttatgggatatggctgatgaagacacaggaactgcgtttgaagtcggttatcttaacgcaagccacacaccaattgtgtttgtttgtgaagatgacttgcaagaaaatccgattaacttaatgttagctaaaggcattagcaagtgtgtgacggatattaacgaattagaaaccttagatttccaatttgtagcgggcgaaccttatccaggtaaaatcatttaatccatattttcaaactgaaaaagcccgtctgaattatgataattcggacgggcttttttaatgcccttcttataattgcccccgttaaatagcggtttgttaaccgggttaaaaagaacaattcattttattgtaaacgattacattgcatgctatgttttacttatcaaatggacaggagtgattggatgactaaaacgttagaagcattcttgcacgaaggattagcatcattgaaggaacaggggctgtataacacaattgatgttttagaggctcataatggcccaattattaaaattaacggtcgcgaactgattaatttagcgtctaataattatttaggctttgctaatcgcgatgaattaaaagcggcggatcaagctgctacgcaaaagtggggtgttggggctggtgcagttcggccaattaacgggacacttcagattcatcaagatttagaagctaagattgccgaatttaagggaacagaggcggcaatcgcgtttcagtctgggtttaactgtaatatgggcgcgatttcagcggtgatgactaaaaatgatgcgattctttcggacgaattaaatcacgcatcaattatcgatggttgtcgcttgtcaggcgcgaagatcattcgtatcaaacatcaagatatggcagatttagaagaaaaagcaaaggcagcaactgaaagtggtctttacgaaaaagtgatgtatattaccgatggtgtcttttcaatggacggtgatgtggctaatttacccgaagccgttaaaattgctgagaagtatcaactgattacttacgttgatgatgcgcacggctctggtgtgatggggcatgggaagggcaccgttaagcatttcggcttacaagataagattgatttccaaatggggacgctctccaaagcaatcggcgttgtcggtggttacgttgcggggacccaggcattaattgattggttgaaggttcgggggcgcccgttcctgttctcaacatcattaacacctggttcagcggctgcttgtatcacagcgctagatttaatcatggcgcaccccgaatatgttgatcagttatgggagaatgccgattacttcaaggctaaattaaaagcggttggctttaaagttgcaaaatcggaaacgccaattacaccggtaattttaggcgatgaacaattaacccaaaaattctcgcaagcattggttgcaaatggtgtctatgccaaaccaatcgtctttccaaccgtaccattaggaacggggcggattcgtaacatgccaagcgctacgcacactaaagcaatgttagatgaggcagtgacggtgtatgaaaaagtgggtcgtgaactagggattatctaaattcaaaggaggaactaacatgcataaagtgatggtaacgggttgtttaggacaaatcggatcagaattagtggctcaattgagagcacaaaacggtgtcgatagtgtgattgcaacggatattcgccgaccagaccataacgaaacggttgaaagtggcccgtttgaagtgttagatgtgacggactatgatcgaatgcttaaaattgcaactgattatcaagtcgacacactcattcatctagccgcattattgtcagcagtggctgaagaacggccacaatttgcttggcagttaaatatgaccggcctcgtcaatgcattggaagttgcccgtgaattagatttgaaattctttacaccgagttcaatcggcgcatttggccctagcacgcctaaagataatacaccacaagatacgattcaacgaccaacaacgatgtatggcgtaactaaagtctctggtgaactgctctgtgattactaccatactaaatacggggttgatacacggggcgttcgttttccagggttgatttcttataagacgttgccaggcggcgggacgaccgattatgcagttgatatctactatgaagctttacgcaaaggccactatgaatcattcattaaagaagggacctatatggatatgatgtatatgccagatgccatcggggccatcattaaattaatgaatgccgatccagaacgtttaattcatcgaaacgcttttaacattacggcaatgtcttttgaaccagaacaaattaaagtcgcaattcaaaaagaactgccagactttgaaatgacttacgctgttgatccagcgcgtcaagcgattgcggactcatggcctaaccaaattgacgcgagttgcgccaaagcggaatgggattttgaaccccaatatgatttagaagcaatgactaaggatatgctggcgcaattaaaaactagaatctaattgtagtaaaggaccgggccccaatcgcccggtcttttttatgtcccaactgagtatcgctcggagtacctaaataaaaatcaacctttggacctatgacatttccaattaaaatgggcataatagaaccatagtcaagtgtgacagatatagaggtcatcatttaaaccaacggaggtcataacaatgaatgaacgtcaaagaattttagacttagtgaaccaaggtgtattaacatcctcagaagccttaatcttattagaaaatttagctaaaaacgatcaaaatacaactaaaatgtcagcagaaccagaagtccctgatgttgatgataacgaacaagaatcggcaccagaaactgatcaacgcgcgatcgttgaagaacgcgccagagaattaacaattgcgctatcaggtgttaaccgccagttacaagacttgaagcaaaaaattcaagccgaccaagaacaagtgactgtgcttgatacaatggaagatttagatagtctgacaagtgaaaaggcggctgaacgccaagcactcaaaacagctgttttacaaaaccaagctcaaattgatgacttggaagaacaacggcaaacattaacggaagaattaaatcaaattgaaaagcaacgtcggcagatggcgaagaatcaatggtctgaaaagctaggcctttcagatgattggaaagaaaatgccagcgaaacattcgatgaaatcagcggtcgtttaggtgaagcaagcctacatctcggtaaactcatgaaggaaactgctaaaaacgtgatggataacgttgactggaaagaagttaacttcaaggtgccaggtttggcaaccgaaaaattcacgcatgaatttatttactcagacgtgacaccagaaatgattaacgtcaaagtagccaacgggaacgtcgatttcaagatttgggatcaacccgaaattaaagttgtggcccaagtcaaactttacggtaagatgggtgaaccaacagcccgcgaagcttttgaagcccgcagcaatatcaatgtaacagatgctgacttggtcttccaagtgcctaataaacgcattcaagcggacttaacattctacctaccagctaataattacttacaaaccaacgttaagttattaaacggcgatattgcgctagatgggttcacagggcgtgatttataccttaaaacgtcaaatggccaattgacattgaacagtacgaatgtcgcaatgttagaagcagaaaacgttaatggtggaatcaccgttactgacggccactatgaagacattctagggacaaccgtcaatggtaatatcgtgatgaaagcccaagtgttaaatagtagtgtttcaactgttaacggcgatatcaaagcttctttcaatgataatcagttacaacatttgaaagctaagtcggttaatggtacggttaagttggccttaccacaaacgattggcttcacacttgaagctcggacacgttttgggatgatcaaaaaccggctagccaatgcgcaaacggttgatcaacaccaaagcacagggagccaaatgttacaattagcacgaaacgaagatatgcaagcagcccaattaacattaggcacaacaactggtaatatcttattaaaagacaatgaaaactaaaaaataatgaatggtggtttctgaataatggcacaaaagagattatataaatcaagagataaccggatgatttccggtgtaatgggtgggatagcagaatacttcaatgttgacgcgacattggttcgagtgctctactgtttgttctcaatcttctcagcagctttcccagggattgtcgtctatattatcttggccctcgttattccggaacggccaagtcaaacgcgtcgcgattctcatgatgaatggagtgaatattaatgccttttctattaatactagtcccaattttggcgattattctcgccattacggtaatgggcgtcttgattggttcagtgatgattctcttcaagttcgcaattccgttactagtgatttggctcatttaccgcttaattgtcggtcataataaaccacgtcaccattaccacgaacaacaacatcaagcctattacagccaaccgaacgattctcgggggcgtaaagaagcacgtgatgtgaaggtcgatgatgacaactggagtgatttttaatgcgctattggacccgcgttttagtgaatacaatcttatttatcgcaatttcgggcttactaccaggactgtttcatgttgacggtattttagtcgccttagtggcaagtattgtcttatcaattttaaacgtgctagtaaaacctattttgcatattctctcatttccaattacgtttttaacactcggccttttcagcttagtgattaacgggattatgttggaattaacgtcaatcttcgtcagttcagggagtaccttcccgaacgtcacatttggcttttctggattaggcgcggcgattgtcgtggcgttcatcctatcgattgccaatacgatcattggcaatcaatttagcagagagcgttattaatgataaagcctgcatcagaattttgatggcaggctttatttttatattaatttaagaaaacgcctacattaatgttgaaaaatgtattcaaaagcaatatgatagtacgtataagagtagaaaaaggacggtatatcatggcggatagtgtttcaatggaaagattagtgacggaccttaagttacaagtgtactcaggggaagctcatttaaaagagaaaacagtgacgttgagtgatatctctcgtcctggactcgaattaaccggttattttaattattacccatacgaacgaattcaattatttgggatgacggaagtttcctttacgcaaaacatgacggcggaagaacgcttaatgattatgcggcggatggcttctgagaacacgccttgtttcttaatttcgcgtagtttagaaccacctaaggaaatgttacaagcagctgaagaatctggtattccagtgttaggatcaaacctatcaacaacccgtctttcaagtttagtgacggattatttagatggtcaattggctgaacggcgctcaatgcacggtgtcctggttgatatctacggtttaggggtgctcatcacaggcgattctggtgttgggaagagtgaaaccgcacttgaattggttaaacggggccatcgtttaatcgcggatgatcgagttgatgtttaccaacaagatgaacggacggttgttggtgaagcaccaatgattttgcgacacttacttgaaattcgggggattggcattatcgatgtcatgaacctctttggggctggtgctgtacgggctgatacatcaatttcattgattgttcatttacaaaactggtcacaagataagaagtacgatcgtcttggttccgatacagaagaacaaatgattttcgatgtcccagtacctaagatcactgtgcccgttaaggttggtcgtaacttggccatcatcattgaagttgcagcaatgaactttagagccaaatcaatgggctatgatgcaacgaagactttcgaagcgaacctaggtaagttaatcgaatctaattctgacgacgaaaactaatttaaacgttaaaagtaccttaatatagtaggtcatccgactagattgagctatactgttataaagacaggatagtactcagtctagtttttttaattgaatatgaggagcgattatcgtgaacctaatattaggtgttttaaatccgattgccctacaattagggccgttggcgattcattggtacggcgtgattattgctagtggtgtcgtattggccgttgtgttggccttgcgagaagctaagcgccgcaatgtcagtgaagatgatattttgaatttaattttatgggccttaccgtttgctttgattggggcacggctttattatgtcatttttgaatggtcctattaccaagccaatccaagcgaaattattaaaatttggcacggtgggattgcgatttatggtggtttaattgccgcaacaattgtgttcatcatctattgtcgcaagcatttcttgtcgccgtggttagttttggatatcgcggcaccaacggttatgattgcccaagcaattggtcgctgggggaattttatgaaccaagaggccttcggggctaaaacgacgttgcacttcttagagacacttcatttgcccaattgggtgactgatcagatgttgattgatggtgcttatcgccaaccaactttcttatatgaatcgacttggaatgttttagggtttataatcattatgagtgtccgtcatcgtcaaggttggtttaaacaaggtgagattttattgagctatatcgcttggtacgcctttggtcgctttttcgttgaagggatgcggaccgatagtttatttatcggaccattacgtgtgtcacagattctatcactcgtgttgttctttggcgcgattgggctgtggatctggcgccgtaaacaacagacgttacccgactatttagaaggtaatacactgcgctcagcagttaaataaaaggagaattaggattaatgacagttaatgttgcagttttaggtgccggttcatggggcacaattttagccaacttattagtagaaaatggccaccacgtcgaattatgggggaatgatcctgagaaagtagcagagattaacgaacaacacactaacaagcattatttacccgaattcaagatcaatccacgcttacacgcaactttagatttgaacgaagcgtttgaagcagtggacgttgttttattcgttattccaacgcaagtcattcggctagtggcagaacaaattgccccagtgctagaagccaaaggggttaaacccgtgattgtcacagcttctaaagggttggaacaagggagtcataaacgaatttcagaagttttaactgaaactattccggcagatgtcagaaatggcatcgtggtcttatcaggtcctagtcacgctgaagatgttgcgatgaaggatattaccactttaacggctgcttcaactgatttagtgcaagtccaatggattcaagaaatcttcatgaatgattacttccgcctttacacgaatacggatgtcattggtgttgaaatgggggcggctttgaaaaacgtaattgctttaggcgcaggtgcattacatggcttgggttatggcgataacacgaaggctgctttaatgacacggggcctagccgaaatttctcgtttaggggtggccatgggggctaatcccttaaccttcatcggtttatctggtgttggtgatttaattgttactgggaccagtgtgcattcacgaaactggcggactggtaatgctttaggcgaaggtcaaaagctagacgacgtgctcgaaaatatggggatggtcgttgaaggggttgccacctgtaaggccgcttatgaattagcacaacaacgctcagttgatatgccaattaccaatgcaatctacaacgtcctttatcttggttgtgatattcgcactgaaattggcaacttgatgcaacgttctggtaaaccagaaattgattttaaatagagaccaattaattcaattgataaaaacgccatcattttaaacaggtatcgcatctgcaaaacgaatatgttatgatgacataggctgataaattgactaaaggagaaccgattactttatgggcgatttggtatctgtaagaccaacttgtgaattttattttgatagaggcatgcaggcatttgagcgatttcattatgaaaaagcccttacttgtctacaacgctctaagtcactggcaaaaacaaaagacgattatatctttgtggtctgccaattagcaatttgtttagaatcggtcggtaattaccgcggtgctgtgattgcattggaagaaattccaagcgtcaattaccagacacatccggaattacagtattttttagcaacggcgtacgcttttttagggcagatgcaagagagctatcaattagcgaaagcttacttacaaagtgacgacgcagattttgaagctgaagccactgaattattgcaagaattaaaacaaattaaaggttaactataaatgtagaaagttcactaactgggcaaacagtttggtggactttttttttaataacgggtaagatacactctattagaagtaacttgataaaagtaaggagattatgcaaaatggctaaaagttatgatgtaattgtaatcggtgctggccccggcgggatgaccgcggcgctttatgcatcacgttcgaacctatctgttttaatgttggaccgggggatttatggtggtcaaatgaataatacggcagaggtcgaaaactatcctggctttaagtcaattttgggccccgaattgggcgaaaaaatgtatgcgagtgccacacaatttggtgctgaatacggttatggcaccgttaatagcatcgaagacaaaggtgagtttaagttagtccataccgatgaaggcgacttccaagcacgggccgtgattattgcaacaggttctgaacataagaaaatcgggattcctggcgaagacgaatatggtggccgtggtgtctcatactgtgccgtctgtgatggtgcgttcttcaagaacaaggaagtcgttgtcatcggtggcggtgactcagcgattgaagaaggcctttatttaacacaattagctagtaaagtaaccgttattcaccgccgtgatcaactacgtgcgcaaaagattttacaagatcgcgcatttgttaacgataagatggcttttgtctggaatgcacaagttaaaaccattgaaggcgatgataaaaaagtagctgctgttacttatgttgataaggaaagtggcgaaactaaagaagtaccagcaagtggtgtcttcatctacgttggtattgacccaatgacaagtgctttcaaagacctaggtattttaacggaagccggttgggttaaaacagacgaccacatggcaaccagtgtccctggaatctttgcaatcggcgatgttcgtgaaaaagacttacgtcaaatcacaacagcagtcggtgacggcggcatagctggccaagaagtcttcaaatatattcaaagtatttaaagaacgtttaaatgagctataccaatgaaagcgccggtccataaaaaatggatcggtgctttttttaagtttcttaacacttgatgccctagggaaagcgtttgatatatgctataattacagtgagattttataacaaatgtgggggttacaaaatgagctggcaagataattatgcaatttggaataatcaaacaaaaatggatttacctttaagagaagctttagacaatatggcaaacgatgaagaagcgcttgaaaaagccttcagcgtgccaatggaattcgggacagctggtatgcgtggtctcttaggccctgggattaactgcatgaatatttatacagttcgtcaagcaacagaaggccttgcccaattcatggaaactttaccagaagcaactaaaaaacgtggggttgcgattagttttgattcacgttaccaatcagaaacttttgcacacgaagcagcacgcgttttaggccaacatcaaattccaacattcgtttttgatgcattgcgtccaacacctgaattatcatttacggtccgtcacctacatacttatgcaggaatcatgattaccgctagccacaatcctaagcaatacaacggctacaagatttacggcgaagatggcgctcaaatgccacctaaggaatctgatatgattacaagctatatccgtcaggtatcagacctatttgcaattgaagttgctgacgaaatggccttacgcgaagccggcatcatggctttaattggtgaaaatgttgatcaagcttatttagcagaagttaaaaaagtaacgatcaaccaagaattagtggatactgttggtaaaacaatgtcattaatttacacaccacttcatggtactgggaaagtccttggtgaacgtgctttacgtcaagcaggcttcgaacaattcacaatggtggccgaacaagccgttgctgatccagaatttgcaacaacaccattccctaacccagaattcccgcaaacttttgatatggctatcgaacttggaaaagcgcaaaaagcagaccttttaattgcgactgatccagatgccgatcgtcttggggccgctgtacgccaaccagatggtagctatcaattaatgacagggaaccaaatcgcatctgttttacttcgctatattttacaagcaagtaaagatgcaggcacattaccagcaaacgccgctgcagttaaatcaatcgtttcaacggaattagcaactaagattgctgctagttacaatgttaaaatgatcgatgtcttaacgggcttcaagtttatcgcagaacaaatccaacattttgaagatactaatgaaaataccttcatgtttggttttgaagaaagttacggctacttggttaaaccatttgtccgtgataaggatgccattcaaacgcttgtcctattagctgaagtcgcagcttactacaaatcaaacggtaagacgttgtacgacggtattcaagaactatacgctgaatatggctattatgctgaacaaacgacagcgattgattttgaaggcgtcaacggcccacaacaaatggctgacttaatggttaagtgtcgtgaagaaagtcctgttgattttgccggcatcaaagtcgcttcagcagaagacttccaaacacaaacgcaaacatttgctgatggtcacactgaaccaatcaatttaccaacatcaaacgttttgaaatatcacttagaagatggcacatggatcgcaattcgtccaagtggcacagaacctaaggttaaattctacgttgggacttgtgctgacgatgaagcaacggctgatttgaaattagctaactttgaaaaagcaatccaagcccttgttaaataacaaaatcctcataaaaagggttactattttacattgacgcaaaatttatctataataagtgcaacaaataggcggactatatcgttagtcggtctatttttgtaagaatggaggcttttttcgaatgggtatgcatcagtatttgcaagggttaaataatttggagacactaaaccgggcaccaggattatttaagtatcaggaacattccgtcgcagcgcattcatttaaagtttgcgagattgcgcagttactaggcgatatcgaagaagaaaacggccaaccaatcaattggcaagtcttatacgaacgggcgttgaaccatgattatacggagcgttttattggggacatcaaaacacccgttaaatatgcgacgcacgagttacggacgatgttagccaatgtcgaaagttctttaacggataacttcatcaataatgaaattcccggttttttacaagaacgctataaacggcgcttgagtgaaggtaaggatgaaactttggaaggccaattattggcagttgccgataagattgatttgctttatgaatcatttggcgagattgaaaaggggaatccagagaatgcctttttggaaatttttgcagaaagcttgaaaacgattatgcaatatcaaaatttgtcgagcgcacaatatttcatccgaaaaatgttgccagacctattgagtgaggattttgccgaccgcggcaagctcacgcaattggtgcgccaaacgttgtcaaactaggctagttcactagtgtggcgaaaatacgttcggtatgttagaatggtaattgataaaaaagagggcatctgttcagtggcttaatcaccacgcgcagatgatcactgacaacttataaatgcgtcatttaagaaggtgtctggtacaaaaccccgttttgtatcagacgcttcttttatcgcaataaaacggcactggaggcaattcatgattgatagacagaacgataacctatttgacttagtcgcaccatatgaacctgctggcgatcaacctgctgcaattgaaaccttaacgaagaattttgaggcaggtgctaaggcacaggtcttgatgggcgctactgggaccgggaaaacttttacaatgtccaacgtgattaagaatctcaacaaaccaacgttgattatttcgcataataagacattggccggtcaactgtacgcggaatttaagcagtttttccctaacaatgcggttgaatatttcgtgagttattatgattactaccaaccagaagcctatgtgccttccagtgatacgtatatcgaaaaagattcgagtattaatgatgaaatcgataaactacggcattcagcgacgagttcgttattagaacgcaacgatgtgattgttgtggcctctgtttcttgtatctttgggttaggggatccacgtgaataccaaaatcacgtcttgtcactgcgtccaggaatggaagttgaacgtaacgacctattacgtcagttagttgatattcaatttgaacgtaacgatatagattttcaacgggggcgctttagagtgcgcggtgatgtggttgaaattttcccagcttctcgtgatgatcatgcgctgcgcgttgaattttttggcgatgaaattgatcgaattgtcgaagtggatgctttaacgggtgaagtgattggtgaacggtcacacgttgccattttccccgcaacgcattttatgacgaatgatgaaaaaatggaaaaagccattgaaagtattaaagctgaattggccgaacggctagctgttttaaaaggcgagggtaagttactagaagcacaacgtcttgaacaacggacaaactatgaccttgaaatgatgcaagagatgggttattgttctgggattgaaaattactcacgccatatggaagaccgccaagccggcgaaccgccttacacgttgctagatttcttcccaaaggattccatcatgatgattgatgaatcccatgtcactatgccccaaattcgggggatgtacaacggtgatcgtgcgcggaaacaaatgttgattgactatggtttccggttaccaagtgcgttagataaccgccccttaacgttgccagaattcgaagagcacgtgaatgaaattatgtatgtgtcggccacaccagggccttatgaagcggaacaaaccgatattcaagtggatcagattattcggccaaccggcctgttggatcctaatattgaagtgcgaccaatcatgggtcagattgatgatttagtcggtgaaatcaatgatcgcattgaaaagaacgaacgggtcttcattacaactttaaccaagaaaatgtcggaagatttaaccgattatctcaaggaactgggcatcaaagtccggtacttgcatagtgatgtcaagacgttggaacgaacggaaattatccgtgatttacgactgggcaagttcgatgtcttaattgggattaacttattacgggaaggaattgatgtgcctgaagtgtccttagtggcaattttagatgcggataaggaaggcttcttacgtagtgaacggtccttaatccaaaccattggccgggcatctcgtaatgaaaatggacaagtcttgttgtatgccgataagattacagactcaatgcgccacgcaattgatgagactaaacgtcgacggacaattcaagaagaatataatgccgcccacaatatcacaccgaagacgattattaaaccaattcgggatgcaatttcaatggtacaatcggttgaacatccagaagaaattaagatgaccaatgagattgatttagagaacatgtcgaaggctgaaaaactagaaatggttgaacgactatccgaacagatgcgcttagcagctaagaaacttgattttgaacaagcggcgacattgcgcgataccattctagaattaaaaagtgaaatagattagaggtcaagtatggcaaatgataagatagtaattcacggcgcacgcgcccataatttaaaggatatcgacgttacgattccaagagataagttggtggttatcactggattatctggttctgggaagagttcgttagcgtttgatacgttatatgcagaaggacaacggcggtatgttgagagtttatcagcatatgcccgtcagttcttggggcaaatggataaaccggatgttgattcaattgacgggttaagtccagcgatttcgattgaccaaaagacgacctctaagaatccacgttcaacagtcggaacagtcactgaaatcaatgactatctccgcttattgtgggcccgagttggtcaacccatctgtcccaacgatgggactgaaatcagtagccaatcagtagaacaaatggttgaccgggtattggctttaccggagcggactaaactccaaattatgtcaccaatcgttcgtggcaaaaaagggcaacataaaaaaatctttgagaagattcaacgtgaaggctatgtgcgtgttcaagtggatggcgaagtgatggatgttagcaccgacctagaattagataagaataagaaacatgatatcaatattgtcgttgatcgaattgtcgttaaagacggggtgcgctcacggttatttgattcatttgaagcagccttgagactatctgatgggtatgcgacagccgatgtaattggcggcgaacaactcttgttctctgaacattatgcgtgcccaatctgtgggtttacagttggggcattagaaccacggctattctcatttaacgcgccatttggggcttgtcctgaatgtgatggtttgggcttaaaactagaagttgatacagacctcgttgtgccggatacaagtaaaacattgcgtgaaggggcgattgcaccttggaacccaatcagttcgcaatactacccacaaatgttagaacaagcttgcacggcctttaaaattgatatggaccgtcctttcagtaagttgacacctcgtcaaaaagatatcatcttaaacggctcacaaggcaaagaattccacttccattatgaaaatgattttgggggcgttcgcgatgttgaagtgccttttgaaggggtcctcagcaatattgatcggcgttatcgtgaaacgaatagtgatttcacacggacgcagatgcgcacttatatgacggaattaacgtgtcaaacgtgtcacgggaagcgactaaatcgccaagctttggcggttaaagtcggtggccaagatatcgctgaagtctcagacaatgcgatcaaagatggccttccattctttgaccatcttgaactttctgaaaaagatcaagtgattgcgaaacccattttgaaagaagttcatgaccgcctaactttcttgattaatgtcggcttagactatttgacgttgagtcgttctgctggcacgctttccggtggggaagcgcaacggattcgtttggccacgcaaattgggtcgaacttatctggcgtgctttacatcttagacgaaccttcaattgggttgcatcaacgtgataatgaccggttaatcggttctttgaagaagatgcgcgatttagggaacaccttaatcgtggttgaacatgatgaagatacgatgcgagcagccgattacctaattgatattggcccaggtgctggggaccttggcggagaagtgatggccgctgggacacccacggaagtcgaacaaaaccctaattccttaacaggccgttatttagcggggcaggattatattccggtaccattaaaacggcgtcaaggaaatggtaaaaaggtgcgggtaactggcgctgctgaaaataatttaaaagatttaacggttgattttccattaggtgaatttgtcgccgtgaccggagtttctggatcgggtaaatcaacattagtgaatacgattttgaagaaggcgcttgcgcaaaagatgaatcgtaattcagctaaaccggggcagtataagactatcacgggttatcaaaatcttgagaagttgattaatatcgaccaaagtccaattggccggacaccgcggagtaatccagccacttatactggagtcttcgataatgtccgtgatttattcgcccaaaccaatgaagcgaagttacgaggctacaagaagggccgttttagttttaatgtgaagggcggtcgctgtgaagcctgcaagggtgacgggattatcaagattgaaatgaatttcttaccggatgtctatgtcccttgtgaaatttgtcatggtagtcgttataattcagaaactttagaagtggtttacaaaggcaagaatattgctgaaattttggatatgaccgtttctgaagcaactgaattcttcgaaaatattcctaagattgcccgtaaactacaaacaatcgtcgatgttggtttaggttatgtaacattgggccaatcggcaacaaccttatctggtggagaagcccaacggatgaaattggcttctgaattacaaaagcaatcaacaggtaagaacttgtatatcttggacgaaccaacaactggtttgcatacggatgatatcaaacggttgttaggcgtactagaacggttggttgatgaaggcaacacggttttagtcatcgaacataatctagatgtgattaaaacagctgattatatcattgatttaggaccagaaggcggtgacaaaggtggcaccatcgttgcgactggcacacctgaaacgttagtgaacgttgcagaaagctatacggggcgctacttgaaaccaattttagaacgggataccgcccgcacattagcggcacaagaatagtcatgaagctgagtcttattttaggctcagcttttttgatgggtttctttttactaaagttattgagcattgcttccaaaaaaagtatgatagatttattagataggaagaggtggtaagatgtttagaagaaatgattggcgctttgattggtcagaactaatgaccggcattattttcctaattggagcgtatttcttattgaataagccccaagcaacattatccggcttagtcatcattgtggcggtggctgcaattatccggggagtggctaaaattagtgtttacggccagttaagacaagatacgggtatccgggcgaccgtgatgttgattaatgctattttagatattgtgattgggttattattcatctttaatattccagcgggtatcttcacaatgagttatatgtttgcaatctggttcttgttagatgcggttgttggtctattaaatgtgagccatttgaagcaatttaacatgggcttatatatgctatcaatcatattaaacgttttagggttgattgttggttcgttattattaatgcatccagtagttgcagctgtaacaatgacaactttattgggtttttactttgtgattgttggtgtcaatgcgattgtgattgcaattgcgcgccgcttataaatgcgaaaagtctagaacaacattcagttgttttagacttttttatgtttatagccgtgtttgctttcaatgacacgccaggaatgctacaatagaataaccgataattcgaggagtggggactaatgacagatacattgaatttagtagtaattactgggatgagtggtgcgggtaaaaccgttgcaatgcagagttttgaagatttaggctatttctgtgttgataatatgccaccttcattattacccaaattttgggaattagtgaaggaatccggtaaggttacaaagatcgcgttagtgatcgatttacgttcgcgcgccttttatgatgggattatcgaaatgctttccgggcttgataatacccaatttgtcacaactaagattctattcttagatgcttctgatgaagaacttgtttctcgctataaagaaacgcgtcgttcgcacccacttgcgcgtaatggtcgtttaatggatgggattcataaggaacgtgaattactaactgaaatcagaaaccaatctcagatggtggttaatacgtcaatgttatcacctcgcgaattacgggaacagattttccgggtctttaagacctctgataatccgtcatttcatatcgaagtgatgtcatttgggtttaaatatggcttgccaattgatgctgatattgtgatggatgtgcgctttttgcctaatccatactatgttgcagaattcaaggcgttaaacgggttggataaaccagtccgagattacgttatggaacaacctgcaacagaaaaattttatcaacaattgacagcactattgaaaagtatcatgccaggttatcttaaagaaggtaaaacaagtgttacgattgcaatcggctgtaccggtggacaacatcgctcagttgcattagcacaacgtttagcagatgatttagccgttgactatccagttgatgtgacgcatcgtgatatgaagaaacgaaaggaatcggtgaaccgctcatgacagctactaatcgcattatccgggtgattaaaggtcgtcgtcccaaggtggttgtgattggtggtgggacgggactccccgttattctaaaaagtttacgtgaacaaaatgcggatgcgaccgccattgtaacggtcgcagacgatggtggttcatctggtgttatcagagattatattaacgttgtgccacctggtgatattcggaacgttttggtggctttatcagatttaccacagttaacgctcgatatttttcaatatagatttaaatcacatgatgccttcttttcagggcatgcaattggtaatttaatcattgcggcgctttctgaaatggaatctggcatctttgatgcggttcaacgactttcagaaatgatggctgttgatgggcatgtttacccagccgctaatgtggccttaacgctaaatgcagctttccaagatggcacagaattggccggtgaatctgaaattaccgcagcacgcaaacaaattaagcgtgtctgggtgaccaagacggatcctgaggatcaagaggaaccaaccgcagttcaagaagttgtcgcagcgatcatggccgctgatgtggtggtcctcggtccaggaagcctatttaccagcattttacctaatttaatgattaaaaatcttggtgaggcagttaagcaaaccaaagccgaggttatttacatttgtaatatcatgactcaaaaaggcgagaccgagtgcttcacagatgctgaccatgtccgggttttgaatgaacatctagggcaacatgtggtggacacagttcttgtcaatactggtcaggtgccagctaattatttggatcaccaaaaatatgatgaaattttatggccagtcgaacatgactttgatgggctgagacaactaggttgccgagtgatttcggataatttcttaaagctcgataatcatggcgtcttccataatggtcaaaaggtcgcaagtgaaattatgaatcttgcctttcaggttaatacaactaagcgaggtgaataaggatggcttcatacgcaagtgaagtaaaaaaagagctaacgcaactcgaagtacatccagaacatgcacgggctgaactagctgctttaatcagaatgaatggctcattaagcttgatgaatcaccaatttgttttgaacgtgcaaaccgaaaatccggcgatcgctcgccggatttatagtttattaaagcaaaactatcaagttgaatcagaattattggttcggcgcaaaatgaaattaaagaaaaataatcaatatattgtacgactcaaatatgatacaaatatggttttgaacgacttaaacatcgttgctgaagacgggtttacaattcatacacgagtgtcagaagatatcattgatgaagatcagcgcgtccgttcatatctaagaggggcctttttagctggtggttcggttaataatccggagactagccgctatcacttagagatttattcactctatgaagagcacaatcaagatattgtgcggatgatgaatagatttgggctaaacgctaaaacaacggttcgccgcagtggttatattacttatttgaaggaagcggaaaaaattgctgatttcttacaggtgattggtgccacgaatgcgatgttgaagtttgaagacattcgaattgtacgcgacatgcgtaattcagtgaaccggttagttaactgtgaaacagccaatttaaataaaacgattgatgcggctgctaaacagattgaaaatatcgagtatttaagggattcagtaggactagataatttacccgcgaagctgcgggaaattgcattattacggttggaatttccggacattactttgaaagaacttggtgaaaagatgccgagtggggcaatctcaaaatcagggattaaccatcgtttaagaaaattaaatcaattggctgaaggttaccaacaaaaagtcatttagaagaaatgatcgttaataagtgcacaagcattgactttcgcaattaaattgtgtacactataaactaacgggtttccggggaggaaaacatatgattaaaccagtattattagatgagcaattatgcttttcgatttatcgcgcacagaaagcttacaaccatttttacggaaaggtcttaaaaccttatggcttaacttatccacaattcatcgcaatgttagcattgtgggaacatgggacaatgtcagttaaggaattaggccaccatttagaattagatagtgggacattaacaccattattgaaacgcctagaagcggatggttgggttgatcgtaagcgcgcatctgacgatgaacgtcgcgttgatgtttcattaacagatcaagcagaatcacaaaaacttgaaatctacgaacgtgtcggtaactgtaccaactacctagatttcacaagcgacaaatatcatgacttacgtcaaagcatgaacgaagtcgaaaaacatttaaatgccattcaatcagacactgatcgatttgcttaaagcaaattatgatgagtgcaaaaattaagcgatcgaagttcttgttttaaagaactttgatcgcttttttatattaaaaagcgcgcccttgaacaaatcaaaggcgcgccttacctatttagcttgtaaaatcgtatcgagttcttctggtgttattgattcatcaaaaatgtgttcaccagcgatgattgttgggacgaatttgatattggcggcttgagcttcgtcaacaatggcagctaactgcacggtattatcaagtgggcttagtttaaggttagcctgcatgtatttatcgaattcagaatccgataaatcagggcgccacgttttttgatgggtgtagagaaaatggatggcgtttaaagcaacagcgggttgatcgaagggtaggtaagtatgggcgaggttaccgattaatagatcatctttatccttgttataaggtttgatgattcgtcgtacttgaccggcttcgacggccttagtgagctgttcctctgatttgagaaaccatttgcgacaatagggacaagctaaattcaaaaattcaacaagtgtgacgggtgcttcaggatggccaatgacaatgccaccttcagttgtcacttgatcacttttaataacactaatatccataataaaacctcctctgtattaaactaagtatagcaaatacacagcaaaaaaggacaccacaaggattaaacttgaggtgtcctgtttgaagtaatgtccggaatgaaaacgtgcttcctcaaactgtcttttccggttaaactaaaaatggcaatcatggttgaaaaacaccataattgccattttttgttaatcctcaaagtcaaagcgtttgagtcagcactctattttggttggttaaccataatgtcgtcaatcaaaccgtaatcttttgcttcttgggctgtcatgtagttatcacgatcagtgtctgcttgtaatttttcgaagctttgaccagaattgtctgccaagatttggttcaaacgtttccgagtcttcaaaatttcgcgagcagcgatttcaatttcagtttgttggccttgtgcaccacctaaaggttggtgaatcaagactgttgagttaggcaatgcaaaacgtttgccttttgtcccagctgaaagtaaaacgctggccattgaagcagccatacccatagcgattgtttgaacatcagatttaatgaagttcattgtatccatgattgccaaaccggctgtcacagaaccaccaggtgaattgatgtagattgaaatatccttatctgaatcttgcgcatccaagaatagtaattgcgcaatgattgtgttagccatttggtcgttcacttcaccagataacatgatgatccggtcttttagtaaacgagagtaaatatcgtaggcacgttcgccacgagatgtttgttcgataactgtcggtactaacattgaattgcctccttatataaagctgagaagatgggcttaaccaaagtaattggtcaatcttcccaataatctataaaccaaattttacagcaaaggtcaactatggtcaaatggtaagtcctaaatactgattaattatgtagggtgcaatttaggtagattgtaaaattaatccgaacgctgttcggacaaaaaagatcagcttcctttaaaatggtgtttaccacaaacccatcttttaggagctgatcttttgtctagtataacctattccgaacgaattaaaatcgaaaccttttgtgaactagggctgtccaatatccaaatgggcgttcggctgaaccgatcaccgtcaacaatttcttatgaattatctcgatgtcaaccttatcaggctgaattagcacaaacagatgccgaatacaagcgatcacgatgtggtcggaaaactaagctgagcgatgagttaaagcaaaaaattctcaaccatttacgtctaagctggtcaccaggaatgattgctcacgaatttaaactagctactaaatctatttataattggctaaatcaggggagaattggtttctccttgaatgatctacctgaacatggcgtacgccaacggcgtaacgttgaccaacgatccaaatataatcaatctttggggcgatcaattgaacagcgtcccatgatgattaatcaacgtaagcgcatcggcgattttgaactagatacagtcgttggtcctcgtgggcatagtaaggcagttttattaactttaatcgatcgcaaatcacggttcctttgggcataccggttaaaagatcggacgacagcgactgttaatgaagcactaactaagttcctaaccacttttaatggtccggtgcacagctttactgtggaccgtggcactgagtttagtgggctagtatcacttgaatcacaatatggtattaagacctattactgccatgcttatactccagctgaacgtggtagtaatgaacgctttaatcggaatttacgttatttttatcctaaagggactcgttttgagcacattagtgctcaagatttaacgacgacgttactccaaattaaccagcgaccgcttaaaatactcgactggcaaacaccgtatcaggtgatgctgacaaatttgtccaaaaattcggattaaatttgcaatctacctttaatccaaaatatgttatactatttattagttaatcagcacgtatcactgtagtatcaagtattgtttgaagactttaatcaactggagtaaccctggagttacaagtagtgtaaagaggcggcttacgctgtttaaacgagaaaatatttagaaacacaagaattgagacataattgcattaacccaaaaataaaaccggcatatgaacatgccttaaccgctagcgatttagtactggcgagcggcgccaattagtgactggcgccccgacattatgtcagaatttaatatgcgaaattaattagaaggccacctagaaataggtggccttcgtcaattctattagaaaacgcctgatatcaattaaccgatatcaggcgttttctaatttaagcatcatattccgccaagtcatagtcttggattgcctttttaattttagttgcgtagttaggatcagtggcatagccagctttttgtaagaggtcggcttgttccgcatagttagtgaggttggtgagtgtcgcttaagtgccaacactcagaaaatcactgtgatcttgaatcgcgatttcaagagaagggtaaactttgaagtaatctttaatggttgtccgttgattattctcgtattcatcggtgttcattaggatttgctgcccttggtattggcccttaacaccaaagaggttattggccttggttgctaaatcgctgcgcccccagtcagattcgataatggcttgcgcgataataatactaggtaaaacctgatgctttttttgatagaccaatttagcattttgaccgatttttttaatgaagcgactttgccgttgttgttcttcttggttagtttcccaggttcgagcgggtgcttgactgctttgatgtaggccacagccggtcagtagcactaacaggccactgaaaactagtccgatccgtattttagacgtgattgttgccaatgaattgcctcccaattgatagtaaagttcagcttaacaaataatacggtaaaagaatcaaaatacccccgaattttagtgtgatttagttaactttaaacaaatttaagaataatcggttggattacagtttagaatttacgttgttcgcgcaatgcggtacactaaagttagtaccaaaaaagcgttcacaaagtttaggaggagttgtaaaatgacacacaaaatgattttagatttagatactgggattgatgatgctttggcgattgcctacgcattgggttcaccagaagttgaattaattggcattacctcagaatatggcaatgttttgacggaaagaagtgtcgtcaatagtcaacaaatcttacatttattgggccatccagaaattcctgtttatttaggggctggtcattctaagacgactaacgactttagcgtgttaccaattagtgcggaaatccacgggcaagatggggtcggcgaaatccatttaacacaaccgtatgcggatgccgctagtcaatcagctgttgattttatattagctgcttgtcaacagtatggggctgatctcagcattgtcgcgactggcccaatgacgaatttagcattagcaattcaaaaggatttaccaacgcttcaaaaagtgggacaaattgtcatcatgggtggcgcgctcacagtttgtgggaatgtttcgccatatgcggaagctaatattagtcaagatccagaagcagctgatttacttttcaagagtgggttaccagtcacgatggtcggcttagatgtgacactcagaacactcttcactaagacggatacccaggaatggcgggaacttgcaacggatgcggccaaagactatgctgatatggttgattattatattaaggcgtatgaagtaacatcacctcatttacatggttgtgccttacatgatccattagcagttgcggtggcaattaatcccagtctcgtgacaaccttcccgttgaacctgaaaacagaggtcgaagggccttcacgtggtcggacaatcggggacaatgcccggttggatgatccggaaacgagaacagctgtctgtgtccaagttgatacaccacgctttttagctgagtttaaaacacggattgggcaactcttaaaagtagcaaaataattaacaagcaaaaaaatagtattattaaaatgaaggtcgtatattagcgttaaagtaagcgcctgtggctatttagtcacggggcttttttgtattatttttttataactaataattaccataagcataaaatcaccttttgcattttgtgaatgttaagttgaaactatacgaaaggagtgttgccaaatgaaaaaggttagtcataagaaattgcttaggcggacattatatgtctgtagtggcacgttgttattactgaatagtggtgttggggtggcgagtgtctttgtcatcaatcaaaatcgggcgcaagcgagtcaggtgaatccacgggccggcttagctgatatttcgattttgcaaaatgcgagtttgacctcgacaacggggacgcaaatgacccctaatgcacagggaaactttgatttatcgttaaattatacggggcaaggtcttgcaacagtgggtgttgcggataaaaaggttttggtttacgccttacccgcttcgcttcagggtaaagttgttggtggtagtacagtcgatattcaagctgatctattaccaatcaccccgggtgatatcccaggtgttaagccgttatttgatgcgttgggattagcgattactgcattggataaggcattaaaaatcccagcagttgttgcggccttcaatgatcttaagaaagttcaagatttaggtagttatcaagaaacggttactgctaacgtctctcctgatggtaaaacaatttcggtcgactttacgcaaggttttggtcgttatgtgcatcaagcctatgcggcattatttaatactttgcgggatgcaatcgcagccgttcattcggacaatatacttatcgagactttagtgaaagcgcttcaaaaagcaagtgcagatctttttgcaattattgatgccattgccgggggcacgtcgacaattttagatagtgctttgagtggtaatttattaggttcggctagcggtactttgcataccacagttagtgatccgggtgtaccaactgatacggttaaagcagctgcgattaataatgccttaatttcagcagacattttgacggccgttgagcaagaaggggaagcagtaacgttgaattttccaacgactgcgactaatccgattgaaaattatgatgtggcaacaccaacggtaacccaaccagtggctgggcaaacaacagtcgctgggaacgtcattttaaaagaaccaattccagatgtcacaagttttgaagcgacagttaccttagctgacggcacgcaaaaaacagccgcggttgatgaaaatggtaactttaacgtgccaatcgacgcagttaaagcaggtgacaaattaacagtcgaaataatcgcacataacggcgatcacgaaaagggtagcgataaggttaatgtgaccgttgaagccggcaatccaggcgagacgaacccactagaaaactatgtggttgctaaaccaagtgttgacccagtcaaagctggtgatacgaaagtgactggtaaagtcactatcaataagccattccctgaaggtacaacgtttgaagcaagcgtgacaatgcctgatggttccgttaaatacggtatggttgatatcaacggcaatttcatcgttaaaacagggcaattaaaagccggtcaaagattgatcgtcacgattattgcgcataatggtgactttgaaaaagatggtcaaccagttacagttcgagtagccgataataaccaggatggctctggcaacggcaatggcggaactggtaacggtggcaacacgaatggtaattcaaacggtagtcataatccgggcaacaataatgccggtaatggtggccaaacgaataatggtggtaatgggcaactagggaattcaaacaacgtcaataatttgacgaataacggatcgaatagtggtcaaaataaccatcatatgttaaatgtgggtgttagtgacacaactggtagtcaaaatgctaacagtaaagctggcgatttaccacaaacagacgccaataagactggtgtctgggcagcggttggggcattcttaatcgcaatggtggcactatttaagagcttattaccaatcaaacgtgataaataataagttatctgaataacgccacaaaaaaagggtgatcataatgatcaccctttttgtattttcttggaaggaaaatcgagctagcggggattgaacccgcattgatcatcatttagtgtctctaacttgatttttcttgggaggaatttcaagtgatgatcagttctaccgattaaactataactcattggtggagcgaattagacgattactttagggaggaatgtctaatgaaattcatgtttgtcagatgattcttgggaggaatttatctgatgtataaagaataccaattgaatgtgaatgaattgtgaaaattcacggatgaaactaagtagaatttgatactttcatatgacggccttcgatgcgccatattggtggagcgaattagacgattactttagggaggaatgtctaatgaaattcacgttcgtcagatgattcttgggaggaatttatctgatgtataaagaataccaattgaatgtgaacgaaatatgaagattcacagatgaaattaagacgaattgacggcttttatgcgaaagcaaaaatgcgaggtaaaaagtcgctgagtagcggccctttacctcgcatctttggttggccagctattgggagatagcgaccttgcaattgaagttcttgggaggaatttcaattgattgcttattattaggatggttctgggagaaaaccgacatagggaggtatgtcgattcgggttaatcagatgattcttgggaggcgttcatctgatataaatagaataacaattaaatatgaacaaagtatgaatatttaattgcgattgttagataaatatgactatctttttgtaagtgcttttatttgtaaaaaaggttagcagtcgctacactttagatagtgataaatttaggaggcgttttaaatggaaaaggtattaatattaggggcgcatggcaagattgcacaattgacacgagcacaattgctagctaaaacggatgcgcaattattgttatttctaagaaaagcgaaccgactaacgatccaagatcaacaacgcgaacagttggttgaaggcgatgctagccagcaagctgatttagtccaagcaatgaagggtgtcacagtcgtctacgcaaatttagcgggcgctaatattgaagcacaggctaaagccgttgtatctgctatgaaagcagcgggggttaaacgcttaatttggatctcaacactcggcatctatgacgaagttcccggggcatacggtcagtggaaccatcaaatgttagatgatggttatttgccaacatacgcagccgccgccaaagtaattgaaacgtcagggttagcctttacaattattcgcccagcttggttatctgataaggacgaaatcgattatgaaatcacacaccgcacggatactttcaagggtaccgaagtttccagaaaaagcgtcgctgcagaagttgtccgtttgattcaaaacccaactgaagcagttggtgattcattgggcttaaataaacccaatacggatggtgacaaaccagaatggtaccgctaaaaaaagaaggtcatagcgaccttcttttttgtgttggattttcttttgactgcggttaaggtatgatagaccaatcataatcaaattgaggtggctttaatgaacgaaccacaaaatcattatacaaatggcgtactaatgaccttagcggtgatgggcacaaaatggaaaccattaattttatgtcatttagtggatggtccccagagacccgctgacttaaaaagagcggttcaaggaatctcatcaaaagtgctgacggatcagctacgagaactagagcgcgatgggattattacgcggaccatttttaatgaagtaccaccacatgttgagtatgccatttctgaatatggacaatcattggtgcccattctaggcgtgatggccaactggggtgaagcccgaatcgattttctaaagcaaagcggtgtagcagtcgatttgacttacacagatcatgaaaaatatgagctttaatgaaaagacaagctggtaaaatttttttgaaattgtcttgattaatttaagctgtcataccacaaaacttactttaaagtgccttagttagtcgaaagtgcgtaattgtttattctgataagccgcctatactaaccttatcaactaaaagtgagggataaaaatgacaattaaaaataaagtcgtcgtgattaccggcgcgtcaagtgggattggtaaagaaacagctacgttattagcagctaagggggccaagttggtcttagcggcccgtcgtgaaagtatgttagcaccattggctgcatcgttgactgctaaatacgatacggagattatctatcaaaaaacagatgtgacgcaattagcagatgtaaaagccttgatcgattctgcaatcactaaatttgggcgcatcgatgtgttgtttaacaatgccgggttaatgcctgtttcaatgttacgtgacggtaaagtcgatgagtgggaagcaatgattgatattaatctgaagggtgccttatacggcattaaatacgcactaccaatcatggaacaacaaaagagtggtcatattatcacaactgattcggttgcgggccattttacaggtgaaggttcgtctgtttattcagtcactaaatatgcgatgcgggctgtgatggaaggcttacgagttgaagaagttggtaaaggtatcaaatcaacactaatttcaccagggcatgcgcaaactgaattggccgctaaaattagtgatccgaaattaagagaagcggttcacaagagtgaatcagaaactggattgagtgccaatgatgtggctaacgccgtggtttatgtaattgatacaccagctaacgtgggaatcaatgaagttatcttacgatcgattgatcaaagagattattagtcaaaaaaagccgtgctaatgcacggcttttttactgttctttaagataggtaaacatggtaccgataatttctttagcattagaatctgtgtaaactgatagtttaaggtcaatttcgtccaagccttcaagtaatgcttgttgctttttaacgaccgctgctctatgattcagcagaagcgtcttgcgggcttcaattgattctggcccaatcatgcagtagtcaatatattgcttgatgtcagcaattttcatctgtgtattttttaagcaacagattgtatggatgagagacatgtcggcatcggtaaaggctcggtagccgctactatctcttttgacaaagggtaatagaccttgtttatcataatagcgaatcgtatagattgagaggccggttatttgagaaacttgtttaattgagtatgtcataatattttttcaattctttcttgcactagagtatggtctattgtttatactgtaaagaaatcaaaggagatagtcaattatgaaaactgcattagtaacgggttcggataaaggattaggatttgaattggtcaagaatttaagccaaaacggttggcaagtgattttaggcgtccgcaatttagagcgtggcaaccaggcaattagtcagttaacatcattaggactaactaatctgagcctcgtgcaactcgatttaatggacgaggttagtattaaagcagctgctgttgaaattgagcaaaaccatacacaactatcattactaattaacaatgcgggtattcccggcaaggaatacgtgggttatgaaacgccgattgaggatctaaaagccacgatgcaagtcaacttctttggcacctatctactgattaaccaattaacgggattgctgcatcaaaatcaaggcacaatcgtcaatattacggtgccaactaatgccaatcatctttggaacccactcgcctataaaacaagtaagggcgctcaaaatgtgatgacgacttcgttggggatttcgtttgaacaacaagcgcaaaacatattaatttatgcgattcatccaggcattatgtcgacggacttaaataataacgtcacgggacctttcgtgcattctgccgaagtggttggcaaaaaaattattcaaacgattttaaataaaaaacaccggtcgggcgactttgttgaaatctatcatcagattccagataatgcgttagttcgcatgttagcaaagcggtttgggccacaagattagggatacttcctgattaaaaaaagattgtattctaaatcgaagatatctataatgaagcctattctgttagaagaggttacaaaatgtcattgattggaattttaattgttatttatttttgctatagccagtttaaagcagaacggccaagacgtttccgctatcttttactaccactctacgcgttattgatgtttgtcacgacttttaagctgaacgctacaaacctgttgttggctaccgttattatattattgggaattgcgattggcacttttcaaggtcggtttgcgcaactgtctttagaaaatgttcaaggtcaaacgaaagttagcattagaggtggttggccgtttctattaggctggggattaatcttgggaattcaaattttgttaagtatttttttagcgcaccaccaaatggatgcagcagagctctcccaagaagttttgcacagtgcgctagaagaattattaccatttagaagaatttacgcctttgactggtggattctatgggccttgtcgggaagtagtagtttagcctataccgggatgttggcttatcgatcaccagatttttggcaggcaattcgacgaagatcacatcgaaaaagttagaaaaccaactaaattaaatttaatattacgcaatagtatgtaagttattaatttatagaacgacatagtctaagttaggactatgtcgtttttttatattagtattcttatttttaaaatgatgactacctttgtatagtaaagaggttcaatgatataaaaggagagcttacaatgaaagcaataatgcaaaatgatttttcggggatagctggccttgcaatgacaacgatggctgatcctaaagtatcagcgttatctgtaattgttcgaaatcagtttataccagttttaccttatgattggttgaccggtgagggtgctttaaaagcgatacgaccggttaaattaccaatggttatcgggtatggctttggcggcattgttgaacaggttggtcgcttacgtaatcagaaattagtgggacgcgcagtgattggtattcaacctaacggtgctgccaaaacaataatcaattcgcaagtaccaccgttattattcaaggtgccacaaaatgtcactttacaagcggctacgacattaattggcggtggcgatgcggcactacacgcggtgcaaaaaagttggattaacaaaaacgacattgttttggttaccggtgcttcaggaggtgtgggaacctatttagtgcagctgttgaaattggcaggggcaacagtgattgcgttagccagttctaataatctcgcctttgttaggacgctaggtgccgattatgtcttgaattatcagactgatttacgccaacaattgcgaaatgttccgcagcctaataaggtgatcgatacggttggtcaacaagatttattaactttaattagtcagcagtatgagacattagccattctatccttatcaatcccattttttcgtcctatgaaaataaaccagcactttgaatttagcaatggttcagtcggtattaatggttatcaacaactattggcaatgcttgccaatcatcaattgcgcgctcatattcaggctgaatataattttgaggatattaaaaaagcccattttgattcgaaaaatgggcattcacagggacggattttattaaagttttaaaatgaatgggttgtgatatcaaaaattgtagcgagagtctcgcttttttgataagcaacttcagctgttgaaggttgactcaattgttcggcagctttagcacagactagaaagagatccgctagcatgtaatgtgattgatgtacagttgtccaatcgatgccttcatttgcaattaacaatgcagttgcatattcagcatgttcgaataggcttagactatataaatagtagaaactgttgatattttcatcaaaagataagaggcggttagtttttagaatgacacgtaattgctcgaatttggttgtgtcgattatttgtgtttcacgctgttcaatataagcgattgccgctagaataaggccttcggtagatgtccacaagctcgctttagaatgactagtttcagctaaagcgagtttcaggtaccgtaagctattagcgacaggttgctgtgtttggaaaagcgccacaccataatagtaataataggtttgtaaatcaacttggcgatgtaattgttgaactagtgaatcatcatctaaataggtaagtatttttgtgtattgatgttggttacagagcgcttgaatggtgggtgcaaactctggcaggctatcaatgactaagtaatcatgaagaagatcgttagtgattgaaagatgtagacgttggcaaatttttgctaggagaatagcattggggatgtaggtgcctttttcgatttggctaatcatcggctgtgaacaaatatcagcggccaactgtttttgagagaggtgttgtgcacgtctttcgagtgcaattcgctgccccaatgcagttacgatagttgtatctgatatcaagtttaagcccctttcaaaatgttatttgcttaaatttaacatgccccaaattaaaataaaagggaggaattaaaatgccagtgttattagtcatattatttatgatgcttattttcaaagcgacgttgaccaaagccgctgtcactgtgttaggaatgttacttggggtttggttagtacggatagtgttaattggattagtattgcttttaattaaaatagttgtacgaaagactcaaaaaaagcgagatgcctaagcatcccgcttttattttggattagagttggtaatctgggtcgataattaagacgggtttgattgtttcgcccttaattgatgcttcattagcaagattaatatcttcgaagtcataaaatttttcagttttatcaaatgggaacatcccttgacggtaaaattcaattaaacgaggaatgtcgatttgtgggattgaatcgcccatattaatgccaacgactgatttatcgttaacgcataaatcgttccaagtatcgagatcaatgtggttaggagtaacagcaattgttgctgaaacaccaccttggcaaagggctttgattgagtcttccatgactggtgtaatcccagtggtgtcgacacagaagttcacaccacggccgttagtgagcgcttgaatagctgcgacaacatcgtctgtttgacggctgttaatggtatcagtggcgccaagttctttagcgagtgccaagcgttcgtcgataatgtcgactgcgatgactttggtacagccagaaattttaccggccatcattgcggctaaaccaacggcccctgtaccgaagacggcgattgtatcaccaggttttggttttaaagtatttaaaatagtaccactaccagtgacgtagccacaaccaagaggtccgagttcacgtaaatctaaatcatcaggcactttaacggcatttctttcacgaacgacagtcgttgtggtgaatgatgattgatcaaacatatcagcaacatggtgttcgttttcagtaaagtgagaactaccgtctggacgtacaccagaaaggttattttcagcataatttaaacattgggttggtacccctttaagacagttttcacaaataccacaagcataaaatgacagaacgacatgatcgccaacttttaagctttggacgtttgagccaactttttcaacaatcccggaaccttcatgaccaagcacaattggataaccaataattgcatcacctttacggagtgcttcatcagaatgacaaatcccgctagcgaccatgtggacttgcacatcgtctggatgaagtggggccaattcgatattatctttaatgacaaatggtgcaccttgttgttcaacaacggctgctttaattttcatgagaataccctcttatttaaatatttaattcacaaataattataacgtttttagaatcgtttacaatattaaattaaggctatcaagtaaaaaggttgaataaccggaccctaaagccatccgtgttgttcacggtcccaatctttttttaaagtgccgctgacatagggattaccggtaataaaataacgataagggagttggccactggccgcttcagtattaacgccgatgcggggagccgttgtaatgtgacgtgggtgttgccgatttgcaagatcaattgttaacggtgcggtgtccacatttttaaaagtcagttgtttatcatgaattcctaaggcgcccattaatttgccggggccattagtgaggttaacaccaggtttgttcggccgattgcgttgcatctgcgccaaaccgtgagtgggttcgatggcccgaatcaaaacgccttgtggttgatccacagcttgcgtcacaatatcaaataggaagaaaccgcgtaattggtagatataaatcgtgccgggttcgtgataaaggggttcactaaatggcgttcgtcgaccgttataagcgtgtgccgcagtatcttgagcacccacataggcttcggtttcaacgattaaaccaccgagggtcccttggtggctcgtgtataacaggtgagtacccagtaaatcacgggcaatctcggttgtgggacgattggtaaaaaaagacattggtgctgattgtatgcttgtcatcttaaaacctccaaacaaatttattttaacacggtgctgcgaagatgtgacatttgtcatatcaaaatcatgacaaatgggtctaagcgtgcgggagagatttcgctatacttggtttattcaaacgaggtgactaagatgattgatattcaacaattaaaaatgcaattcgattcccaagttgttttagcaggacttgatttaactgttcaaccgggtgaaattatcggcttggtcggtgctaatggggccggcaaatcaacgttaattaacctagtgttggggcgattaacaccgacgcaaggtcagattcgtattttgggtgaacaaccaaatgaaaaacgccacttgaatcaagtcggtaccatgactcaaggtgatgtgccactagcacgcttaaaagtgattgaagaactggcattagtgcgcagttattatcaaacaccgctagcaactgaaatgttgttaacccttgcgaacttaacggaacacgcccaaaaattagtgtcacagttgtcaggtgggcaattacgacgtttatcgtttgccctcgctatggcgggcaatccccagcttctctttttagatgagccgacggttggcatggatgtcggtagtcggcagcagttttggcagcagattgatgatttgaagcaacaagggaaaacgattattttaacgtcccattacttagaagaaattgaacagattgcgactcggattttaattcttaaggcgggccaatttcaatacgatggggactttgccacgttacaacgccaattcaaggatgcgcaagttagttttacgacgaccgaacctctggatagttttacacagtggtcagcggttaccagtgccagtcaagatggcgcaaaagtgacattacaagttagtgatagtgatcaggtattagcacagttggcaccgttattgctcacaaaggtccacgatattcgaattcaagcgagttcattagccgatatctatcgcgaaataatgggggaataatagatgaagacagtgatgacacaaacaaaaatggattttaagcgggcttatctaagaaatcccagatttgcctttttctctttattaatgcccattggtttttatctcttgtttaccaaagtgatgaatcaaggtctagcgagcgcaagtttcaatttacagtacatggttagcatgacgacgtatagtttaattctcagcaatatttttacgttatcgacactgctttataacgatatgagagaaggtttgttagcgttgattgatctgtcgccaacgagcaaatcgacctattacacggcaaagttgcttaatctaggcgttatcaacggcttaactattatcgttatttttgtggtcgcagcacttagcaatcagctccaattggcatggacaacatggctattaacagcgggatggttgtggctagcaagtttaccactttgtttgctgggcattagcatttcgtttttaaatgatgataatcaaattcagttggcagcgaatttactcgcatttccactggcaattttaagtggtctttggtggccgttagcgctgatgcctaaacaggtacaagtcatcggtcagcacttaccggtttatccaattaatcaaatcgcgcaatcaatcgtcttaaaaaagacggttcacttcgcagattatggcgtaacgcttggttggactgtgatattagttgggcttgtcgtatacttaaatcatcatcaaaagggagcacgtcattaatgtctttttttaaacgttacattgcaatgccccaacaatacggtcttttcccgtatgtttggttactctttttacttttcccaatcgcctattcgtttccgtttaaaacattgcggcaacaggtcattatagggttggtgcttatttttgtgatcgcgtaccgcaatagttatgtcgccactacctatcgaccgttctggttgttgctccaaatggtggtgagtgcgattcttgcggtgattgttcaagcgctctatctcagtatttatacggcctgggtgtttggctcgattccgatgcgccgacgtagtttctggggttattacggggcctatatgctgtcaatcttggtacccacgctttttctttactattattatggtggtcagatggggcgtgatgattgggttggcttagccgtctatgggttattctgcattttatccccatttgcagccggttcaattcaacgttataatcgcaaaaatcggcagttaatgcagaccaatcaacgattgacggaaatcattaaataaaatgagcgccagcgaattgctcgtgatttgcatgataacttaggacaatcgttttcgatgattactttaaaagcgggatatgcgcgtaaattattggctaaaaaaccggatgcggtgcctgaacaactattggcgattgaacaagcgtcccgccagaatttaaaaatggtgcgtgacattgtggccggcttacggcaaacgacaattgccgaagaattgattaatcaagaacgtaatctcagcgtagcgggcatcatcttattaacgaaggatgaaaatcaaattgaaggtttaccacaatcaaaccaacaagtattagcacaatgtttgcacgaagcagtgactaatattattcgttacagtcacgccacggagtgttacgtgacgtttgcgcaatcggcaacgacttttcagatgacgattcaagataacggccgaggcttgaaaaaggctgaccagtttaaaagtcatggaatggcagggatgcgtgaacgcttggaagtgattcagggtgaactgaccgttgatggtcgccacggaaccacgttaacgctgacaatgccaatcgttacggaggcaaaaaatgattaaactttatttagcagaagatcaacaacttttaaataccgcactagctggtattttagagctagaagatgacctaacaatgattggaaccgccactaatggccaaatcgccttggaacagattgcaaccttacaaccggatgtcgctttactggatatcgagatgccggggttaacgggacttgaaatcgctcgacgattgcatgaacaacagccacaggttaaggtcatcattttaacgacctttgctcagactagttattttaaacaggcgattagtgctgaagttgccggttatctcttaaaagacggccccagtgatgatttaatcgtcgcgattcactcggtgatggccggcaaaacagtctacgccccagaattagtggtcggcttaaccaatcaaccgcaaaatccactttcacaacgggaaaccgatgttttgcaggcagtggccaatggtttgagcaataaagaagtcgcgagtcaactcttcttatcggatgggaccgtccgtaattacatgtcgacgattctcagcaaattagccgccagtaatcggattgaggcgattcaaattgcgcgccataatggctggttataacggtcagactttaaaattgcatcgcagtcgttaattgactatgcttgcaagcataaaggaggcgtcaatatgagtttagaaaacctgcataaatgggcatttttttatttttcacccgcattttccccggaacaaaataccgttattaatcgcaatcaggctggaacctgtgaaatgattacggtcggttttgatccaagcgctaaaacggatggctcggtgattggattagccctacaattgaaggcagaaggggttcagtttatcgaactttgtggtggttttgggccaacttggacgactaaaattaatgaagcattgaactacgaaataccggtgggcgcggttatgtatggccctgaattccgccaaccattatttgaaatcatgcaataaaacgttaccaagtagagatttatctgaaaatagcagataagtctcttttttaagccttttttattaactttctgtgtgcggtccggtataattcacttataaattgtaagaaggagggatacgatgttaaagaagcgacgaacattcataatcggattgggggctgcactattatgtagtctgttcttgatcctcaatgttgctaatgtgcaggccaaacaagttttacagttaggtgcacaggcgccgcttgatacgatcgatatctcgacttcaacgggttacggtcaaactggtaatattttcgaaagtttataccgactcggccaaaaaggtaaaattgaagctggcttagcaaagagtagccaggtttcagatgacggtttaacgtggacttttaaaattagaaaagcacaatttagtaatggtgatccaattcgggcccaagattttgtttattcttggcaacggacgattaaaccaacgactaaatcgccttacacgaacctatttagcaatatcaaaaacgccccagcgattgcggatggtaaattagatccgaagcaattaggggtcaaggctttggataagcacacgttacaagtgacgttaaccaaaccggttgcttatatgaaaaccttgatggcttatccattatttgcgccacaggatcaaaaggtgattgaaaagtacggtaagaaatacgcgacaaaatcaaaatacatggtttactcgggaccatttaagcttaaaggctggtccggaacgagtgaagaatggcagttcaagaaaaatccgcgctattgggattataagaaagtgaaattaagtgccgttaaatttacggtgttggaaaacaccagcacagcgttatatctctatcaagatgggcgtttggatttaacccaactcgataatcaacaagttgaaaattatagtcgtaatcgcgatttcaagcgttatccttacgcgcaaacttacttcttaaaatataatttcaacagtgacaatcaacaggtcaaacacattttgaataatcaagatgcgcgtctggcactatccctggcgattaatcggaagacaatgaacaaccgcctctatggctttaaaacaaatccggtcacgggctttgtcgcctctgggttggccaactcacctgttaaaaaggtcgattttgccaaatcacaagcggtgccacatacggttgattacgaaccaaaactggccaaagaatattggcaaaaggcgctaaaagcaaccgggatgaaaaaagtgacactctcattaacagttgatagtgatgatccgaatacatcttatgtcagccagtatttaaaaggacaattggaagaaattttaccaggcttccagctcaacttaagaacggtgcctagccaagttgcaagcagtcgcgatcatgagggcgactacgacatcctattatccgcttggggggccgatttcaaagatccaatttcattcttagaaatcatgctaccaggggcggccaataataccggtggctttaagaatgcggattaccaaaaaaacgttgatttagctacaaatcaggatgctaatgatccaagtcaacgatgggctgatatggtcgaagcagcacaagtcttgaaccgcacacaaagcctgacaccgttataccaaaacgaaacgggttatctccaaaatccaaaggtcaaagggattattcataatactgctggaacgcagtggagttataagaccgcgtatattaaggggcaataagccaccaaacagattattattgtttcaagtggcgctatgctaaagtaagggtatccaattcagaaagagggtattttaaatggcaaagcaatatgaaacaacgatgattaatgaaggtggccgaaacggatttgtttacgacccagaaaaatcaacgaagtatgtgattaaagcgcctggcacagataaaactggtaagagcaccaacccggaacaactttttgctgccggctacagttcatgttttaacagtgccttggaactcgttttgagccaggatcagattaaagctgaaacgacggttaaagcaacggtttcactttataatgatggccccgcagatttctatatcggggttgaacttgtcggtcatattgaaggcctctcaccagaagatacaaagctctacctcgaaaaagcccacgaagtttgcccatattctaaagcaacacgtggcaatatcgacgttaaaattgatgtcatgtaagttaaatataaaagcgccgcaacaatcagaaatttgattgttgcggcgcttttttattttttaaattaatgagccctagtgttcatctgtaaccaactcttcaaattaacgccaacaatgcacagtaccaagccaatgatgattgcactataaccaatttgttgactggcgatgattgtcagtatcagcataatgaggcccgctagcgaataataataagcatcaaggggattgaatttatgcatgaataaaaacctgccttatatcaatagtgatttaagtatcacatggtataagccgttctttcaattgagtgggcagaacttcactattttataaacaaatcaggcgcctttttttactagattgcttcaggtatactaaataaaaatcgttatgtggggtaactaagatgactcagaaaaagaaatggccggtatggctcaaagtcgtgatgtggattgggataattggtggtggctttgccgtgatgattatgttgaatctagcttattcaaaagggctgaccgcaattgcccagagactaggtgtgccttatggctattaccaccatatgcatcatgagcggcaccactatgaagaacaatatatggccaatgatttcgacgaggtggggttaatcttaggcgttttaacggtcttaggcggcgtatacttactcttcagtttactagaaaatcaggagaaaaaacgcaagaaacatgcaatcaaacaacataataagcggcttaataaagtaaagaaacgtcactagtgacgtttctttttttgatgcgcttaaaagaacaacttatcgcagtattcagaccacttatctagaagtggaagacagaccagccactttgccagtaaactaaggtgattgataaggaggttgcagcgatgacattactgacagcaacagggattacaaaaaaatttggcactaaaactgccgttaagcagattgatttaacggttcaaaccggccagctagtggctttcttaggccccaatggcgcgggtaaatcaaccacgattaatttattaaccggtacgattgcaccgactgccgggacaattgagatggcaggtttcaagccggataatcgccaatatcaaaagcagattggcgttgtttttcaaaaaagtgttttggataatcagttgacggtttggcaaaatctcaaaagtcgtgctgatatgtaccaaggcgtcactttaacacctgaaagtgaattgattaccgcttttggtttaacgtcgattcttaagcaaacttacgggacactatcgggcggtcagcgccggcgagttgatattgcccgggcgttgattcatcaacctaaactactttttttggatgaaccgtctactggcttggacattcagacgagaactgttatttggcagacgttaaaccaattacgtcagcaacagggcttaacgattattctgacgacgccttatttagaagaagcggctgaagctgattttgtctatgttatcgatcatggtcagattattgcggccgatacggttgagcagctacaagcaacctatgcacaaagtcagttgatgattgaaaccgattatcctgaagttgtcttagcccaattagcaccagaatggcgtgtcttacaaacaaaccatcaattacagattgcgctacccgatgatcaacaggcaatcgctttattaacaaaagtgcagtcggtgattacccattttgaatttcgccagggcaatatggatgatatttttatggcactaacaggaaaggagattcgctaatgatggctttagttaaacggcacttagcgctttatttcggtaacaaaagtggggtgttcttttcattattgggcgcgttaattgcgtttgtattgtacctcgtttttttgaagcataatatgctagccagttggtcacaattagcggctccacagaagttacttgatccctggttaatcggggggacgttagctgtgacggcggtcaccacaactgccaatggcttgaatcagatgattgtcgatcgcgaatcgggaatactggccgatttagcattaactgatatgtccttcatcggcattcagttcagctacttagtaagtgccgtgatcattggtaccttgatgcagttggttatgtttgtagcaatggttggttattttaacctcacggatcaatttgtgttgtcgctagcagcaatcgtacctgttacgggcataatgttattgagtagcattgtctggacgacgtttaacgtactaattttatcgtttgtcacgaatctggattctctagggaaaatcggtaccattttagggacgtccgccggcttttttgcgggggtttacttaccaattggagctgttccggtcgccgctcaaaatttaatgaaaatcacgccgtttccatataatgcggctatctatcgccaagtattgatggctgatcaactaaaaacgactttcaaacaggtacctcaattacgtcatcagtttgaacagacgttaggcatcggcattcagttgcagcatttaaccagttggcaagcaaataccttaatcttagtgggctttagtgtcgtctttggcgcgctcacactggtgtttgccaagagcagtcgtcgcaaagcaatcaataaggtataataagcagataaaaggtggtgggtgatttgaaggttaattttgaacaaaatgaagacttggcagatgatgatattcaagtgacggttcaagctgcccacctttcgccgacggtcatcgaattgattcaagcgctggaagcccgccagcaatcggttgatgtttatccgattacagttgatgaacgggtcgtgttagtgccaactgctgagattatcgcactagaggtctacggtaatgatgtgacgctctacacggttaaggcgacctatcaaattcggggtgttttgaagaagatactcagcaaattaaaccaacaagatttcattcaagttgcaaaaggggctgcgattaatttgaaccatctccaatcgttagaggctgctttttctggtagtatgacggcctttttaacgaatcagttgaagatgagtgtgagtcgtaaatacttaccagagttgcgacaacaattagggatgtgaaaaagatgctgaaagaaagtttaaaaagtgcggggattgggttattgattggttcatttacttttttagtggtcatcatgagcctcaattcaacgattacaataacgcgtgctaatattctaagtaattgggtcatgagtgccttgattgggattatatcaatgatttttgatagcgaaaaaataccgttcgcatgggcgctctttagccattattgtggggttttattactggttggcttaaccggcatttataatggcttgtggcccatttttatagcccatccagttcgccatgtattgttcgtaacactgatttacgctctcgtttggctgggattgcaaattagtaactggattgatgtgcgccgaatgaatgaaaaactggctaaacgccgacaaatgaaaaaataaaaaaagaaacgcgactaaaataacgaatcttgtgattcattggttagtcgcgtttttagtttaaactctagcgtatttacgggcatcagaatagttaaaaaattcagctttggacgtgcagtcgccacgataaacaccattccagccggctctttgaccataagcacctaggtcgattaataattgttcttcagatttattgagatgaattttaccaaagccaacactataaatataatttgagaggcggttgactaacgcttcaggattcttggcagtttcaagtgtgagatagacctgactcaaaacatcggtaatgtcgagaagtgcgtttgatttatctggatgagccattaggctgttgtaaagtgtgtgaatattttctttgaccattgattgatttgtcatgtaaatccctccatggattaatatatttcatactcgttatagtgctcagacaatattttgtcaatcatgattagtcgctaatttgacctgactggtaaaatttaaaatgtgcattactgtatcgataacgtttaacgtttgaaatgagacgttaatcttttttttgaatattggcctaataataagtcataatgaacggataagatacttagttggccaattaaagtattgattactgattaggaggatgccttttgagcttattattaaaacaaacccaggaataccaaagaattctttctttggtaatatcaatgatcattatagcggccgcctatttgagtcactcacaagcggctttaggatttctaatcgtttttggtgttgctagtttaggggagcatttcttactctattcatcgaatgtcgaaaacagttggacagggaaagtagatttaatgattaaaatcattggtctattctatgtcctatataaatttgttgggtagttaaaagttggaataaaatcatttattccaacttttttagttgttatcgactgttggcggatgttagttatttttaataagataagcttgtgaattatgtataatttgattagactaagattagaagaaagtatgatgatgtttaaaaaactttcagaaaaaataggggtatggtgaaattttcttcgtgttaaacgtagatttgattgccataagataggttgttgggacaaatgttatatacggatgtatgggtttcttttttacaaaatttcgttgcaattttattgatttttttattgtatagatatgttcaaagaaaaataacatttaaacgcatcgtaatggacgtgctaataacagttattttttcaatactatatctgtttatttcagatgcatccttactcgtgatggtattaatccggttgggatggcactttcatcagcagaaagaaaataagattaaaacaacagatagtgccgatttaattctgattattgttattcagttattattagttgccatagggacgattattagtcagtttagcatgtcgattatcaaacatgattttagcgtcaaaattttgagtagcaatgctactgaaattacattatggggcatcttcattgccgttatactggatggtttatttttaattttattgaaaaataaccgtcccaagttacaacgcttaaatcaagaaattacagaattttcattggaaaatcaatacttcagatttacgttcggtctatttttagcgatacaagttgtattggcaattggaaatcttcaagggataacagcaacgatattattaaccattattatcatttttggtgtcctcatcgggatgacattttggcaagtgatgctttttttgaaggcttattcgattcgccaagaagccaacgaccaatttgtccggaatcaacaacttcaagattatctagtcaatatcgaacaacaatacaccgaattacggcgatttaagcatgattatcaaaacatcttattatcgttggaaagttttgctgaaaagggcgatcagcaacaatttaaggcctattatcaagaactattagcgcaacggccaattcaaagtgaaattcaaggggcagtcattgcacaacttgactacttgaaaaatgagccaattcgaggattagtcattcaaaagtttttggcggccaaacaggctgatgtcactttaaaatttgaaatgaccgaaccaatcgaattagcgacggctaatttattaacgattatccggattatcggtattttattagacaatgccattgaacaggctgttcgagaaacagataaattagtgagttgtgccttcttacaatctgaaggcttaatcgaaatcacgattgaaaatacggccagtcaagttaaggatatccaagcattttcagagttaggctattcaaccaaaggtgctggtcggggaactggtttggctaacgtacaagatttgattgccaaacaaaccaatttattcttagaaacacagattgaaaatagaaagttacgacagacattgatgattacggaggaaacttaatttgtatcccgtttatttattagaggatgatttacagcaacaagcgatttatcagcaaattatcgcgaatacgattatgattaacgaatttgcaatgactttaacatgcgctgccagtgatactgagacattgttggcggcaattaaggaccaacaacgaggtctattcttcttagatatggaaattgaggataaccgccaagccggtttagaagtggcaactaagattcggcagatgatgccgtttgcgcaaattgtcttcattacaacccacgaggaactgacattgttaacattagaacgaaaaatagcgcccttagattacatcctcaaggatcaagcaatggctgaaatcaaaaggcaactgattgatgatctgttgttggctgagaagcaaaatgaagcagcggcgtatcaccgagaaaatttatttagttataaaatcggtccccgctttttctcattaccattaaaggaagttgtttatttatatactgaaaaagaaaacccagggcatattaatttgttggccgttactagaaaggttacttttccaggtaatttaaatgcgttggaaacccaatatccaatgctctttcgctgtgataaaagttacttagttaacctatctaatattgccaattatgacagtaaaacgcgtagcttaagttttatcgatggcagtgaagcaaaggtctcgtttcgtaaatcacgagaactagtagctaaattaaaacaaatgatgtagcgcatattaacgtttaaccgataaagttgaacgttaatattttttttacgcagaaatggcaaattgaagcataatagttctataaatggcaattgaactagcctgaaacaggcctattcataaattaaggagaatataaaaaatagtgtttcttaagaaaagtaacgggttaattattatttcaattttattaataataggtggtattggtctaataatcatcttaggcaatgaagatcgttttagactagcggatataatgcttattatcgggataaccttgtttattaatattaagttcaaggaccgtcattaacgtgtttgatagacgtttaagataaaaaattaaacggtgaagtaaatatcattagagaagcatctgaagactttagggaggggaagttatgaagagattatgcatattagcttatcaagggctgccatttctgattgataatttggttatctttaataagaaggaacggaattttgtgaagaagttaaacaatagaatcgatgaactatcgatgagttggcaagtagaacttgatagctcatttggaaatattagtgatattgaagtcaaagcaccgcaagccgtgttattaaaaaatggcttgcgatatcgttttaatactggcagcttccctaaaaatgatatctatcaattgggagctttagaattacaagaaggtgatattgatgccgttatttcttttttgaagcatttagagaggtagtttgaatttctttgatacacaattattttgtaaggtatcaactagatactttattaaaaaaattaatatttatggtagattgcaaatttaatccgaatttttggacaaatttgtcagcataacctgatacggtgtttgccagtcgagtattttaagtggtcgctggttaatttggagtaacgtcgtcgttaaatcttgagcactaatgtgctcaaaacgagtccctttaggataaaaataacgtaaattccgattaaagcgttcattactaccacgttcagctggagtataagcatggcagtaataggtcttaataccatattgtgattcaagtgatactagcccactaaactcagtgccacggtccacagtaaagctgtgcaccggaccattaaaagtggttaggaacttagttagtgcttcattaacagtcgctgtcgtccgatcttttaaccggtatgcccaaaggaaccgtgatttgcgatcgattaaagttaataaaactgccttactatgcccacgaggaccaacgactgtatctagttcaaaatcgccgatgcgcttacgttgattaatcatcatgggacgctgttcaattgatcgccccaaagattgattatatttggatcgttggtcaacgttacgccgttggcgtacgccatgttcaggtagatcattcaaggagaaaccaattctcccctgatttagccaattataaatagatttagtagctagtttaaattcgtgagcaatcattcctggtgaccagcttagacgtaaatggttgagaattttttgctttaactcatcgctcagcttagttttccgaccacatcgtgatcgcttgtattcggcatctgtttgtgctaattcagcctgataaggttgacatcgagataattcataagaaattgttgacggtgatcggttcagccgaacgcccatttggatattggacagccctaattcacaaaaggtttcgattttaattcgttcggaataggttatactagacaaaagatcagctcctaaaagatgggtttgtggtaaacaccattttaaaggaagctgatcttttttgtccgaacagcgttcggattaattttacaatctaccttatatttaaatggaggagtgcattaataatgcgtttaaaaaagaatttctataaatcattagatctctatattggtatttgggccttaataactagttttacagtattcaatgaaacgatgtttagtgtttcttggtggttggatattgttggtgtcataatagggatttcattaatcgtatcaggcttatttttaggcgataaagcttaatttttgcgccttcgaaatagtaataagaatacatactaataccaaatattaacgtttaaccgataaagttgaacgttaatattttttttactcgaaaatggtaattggcagcataatagtgtcataagggagttggttatattgacaattaatgatcaagaactattcgatttaatcgatgcagcttacaatgaagatttatcaaatcaaccacaaaaatatgaatacaaggcagccttattagcaggtgccaagcgattaatcgaaggtgcagattcgcttagtgtctgtgtcgatatctacaatgcttatcatgaaaattacatcgtatcgataagcttaccgcgtgctaatcgcaatttatatggttacattcatcataaattagaaaaattagatcgaaaacgattacgcgatttgaatttaggttacggtttaatcgcctcttcaatgatgtttggcggtatgcattaagaataggagttggataatatgaaatggtattcaggtggttcagaacgtagtgaacaagcgattacaataattaaggcgttgcaggatgcttcgaaaggacctgctttacaaactgttttaacgacttatcaggcagaacttgaaagtaaaaaagcaagtgtgcccttgatcttgagtcgcttaaatttggcaattgccaatgcgcttcaagaagatggtctgactttatcgactgcgcaatctgaacaagtcaaagcactaacggcactctctaacattcgatatggttactaacggcattttttaaggggaattagaatgacatttaatcactttttttataaagcaattgatttttatttcgggctctatcttttattttcaagctggtcgattattaatgcaagtatcagcaccatttcatggtggtttgacttcttctgtattgtgttgggtttgtggttaattatcgaaaatttaatcactaagaagggctgatgatgtttgtcgaattggaggaaaaaagttggctagtgatcaaggattgctgaacattttgcggttaattgaagtcgccttgagtgatccgcaagtagcggcagattaccaattagcgactcatttaaacaagggcgcagcggctgttaaaaatgggtacttggatagtcaatgccgcaatgactatcaacaggcgattaattatttcttgatggtcaacggctttaaggtttcaccggccctgatccaattaatgtcgttataaaatacggtacaacgataaatatttaaaatttaataaggggttgggacaaaaataacttttgtcccaacccctttaatgattcgctaaaaatgcgacgactgagcgtgtactgagtgttgatagttctagtgcgccaagttggtagatttggttttgatcaaaatcgtgccgctcaaattggtgctgtaagccattttttagaattaaggcggcgggctttttggccttaatggcctggctgtctccaaaactttcatctaatgaaacatgccaatccaattgtttggcggcaagcgcggtgtttaagtgcatcacaaattcctgctcgtggtgactgctaaagttgctcccaataattaagggaagggttgtatagactaaaatggcttctttcattgtgacatctccttgttttatagctatcatatgctattatacaactattgatagcgctttatatataaaaggaggttttgataatgtttgataaaacgtattttgatttctttaagcatatgagtttaacaggtgatggcaccagttggtatttattggcgttgaagacgccgttagaggcagcatcagtcgttgaacggcttcaagggcagttcgaccaaattcgtttatatggtgaaggttatagtattcgaagcagtttgggacaagcaaaggtgattgaactaattgaacaatctttaaatttaaaagttgagcaagacttccaattagtcagtctttcgcagtttaatgcgattggacgttaaatgtcgataataatgagaagctgctaattaccatatgaaaacgttctaataaacgcgggattccctttgacaagtgggccaaagaggactacatttaaattgtgaatgatagtacaaaaggcactaatattcatgttcaggattaatcaatatggaagaggtggccattatggcaacaaataatttagttttgaagacagctgacatttgtgatattcgtgatattgaagaggcgcgggcaacaatcaaaccttacatccgggaaacaccattaattcaatcgatgtttttaagccggaatgtcgctaagggcaatgtttatctgaaattagaaaacatgcaattaacaggctcgtttaaatttagaggtgccaataataaaattaatcatttaactgaagaacaacgtcaacgtgggattgtaacagcatcagctggtaaccatgcacaaggtgtcgcattaaccgctaagttattgggaattgatgcaacagttgttatgccagaagaagccccaattgctaaacaagaagcaacagctggctacggtgctaacgttgtcttacacggtgcaacgtttaacgatgcacgtttatacatggaacaattagcagaagaaaaaggcatgacaatcgttcatccttacgatgatcgtgaagtcatggctggccaaggcacaattggtcttgaaatcttagatgaaatttggaatgtcgacacagtaattatccctgttggtgggggcggcttaatttcaggtgtggcaacagctttgaaatctttcaacccatcaattcacattatcggggttcaatctgaaaatgtacacgggatggcggcttcaatcgatgctggcaaaattacaagtcaccatgatgacttcacattagcagatggtacagatgttgctattccaggagacttaacttacccagttgttcaaaacctagtagacgaattcatcttagtcactgaagacgaaatcgcaatggcaatgactgacttgatgcaacggactaagattgtcacagaaggtgctggtgcattaccaacagctgccttattaagtggcaagattgatcctaagtggcttgaagataagaatattgttgcgatggtttcaggcggtaatgttgatttaacacgggtttcaggtattattgaacacctcttcaaaccagcagacacaagcaagggtgttgttggataggttatttaaaaaaaggtatcgcgaattttcgcgatacctttttttgacgtttatcgagcaattattgacgttcattaaaattgaccaacagttaaaatcgattatggcatactaatcttaaatcgaaaaattaggtggtttgaaatggttactatgaatcgcgtctgttatttcattttgttagttttattaaccagtgtgatctatgttgaagaattattaggggttagcaatcattatctagcccagcatgaaatgcggtttatcgtgtttgatttaatcatgtgggggcttttattggccttgttactggttatttatcgtcgcttgtcaaaaactaacgggccagaagtagcggtcccagtgattaagaaggttgggattatattgcttatgctagcagcgagttacttgttaaactggtttgatcaacagtggaatccactagcgttaccacaaaatcaggtggtgattgatcagcgaatgcaggcagcgccttatttaacaacaatcggcaatggcttaatcgcaccaacaattgaagagctattatttagaggactctttttcaatttcttttttctgaagaaaaccagattcaatagtttcttgaagatcgttgtttcaggattggtatttggcagtctgcatgaaatggcaattaattataattggttgatttattgtgcgatgggctggattctagggacgacctatttctggacgaaggatttaaagtgttcaatgattctgcatgcggtgattaatttgctttagttaatcggttggtccgcatctgcaacaatttcgaggtggttgccaacgaaatcgtggtgaggataatgaagaaggtcattggtaataatggcgctggcatttgagcacctgaaaatttcaggataatcgtggttagcgtcgtgaaagtcgataggatattcaggattaataatgagagctcgtagtgaccatcttgtttagagagaatgtggcctgagtataaaacgccaacagcaagaataatatataagaagtaaaaacctccaaataaaacaatgaagccactaggtgattccttggccattttgagaatcgtttgatcagtaaaaaccgtgataattgtggtgagaatttggtaggcaacatagagggttacgaggtagattagtgtcggaatattgcgtttcaatttttgtttgagcaattacttagtctccaatcgaagtttttggtactgttagtttagcatgtgattaacggtaaacgctataaaaagaatggcggcgtaaccgaattcatttgtaataattattatctgcgttataattaagttgtacaaaatagacaaggagtgatcagtgtgaaaattattgttgtcggttcatcccatggtgggttcgaaacagttcaagaaagtttactagattatccggatgcaacaatccaatggtacgaacagggcgattttctatcgttcttatcctgcgggatgcaactctatttagaaggaacagtcaagaatgttgacgatgttagctatgcaacgccagaaggcatgcgtgctaaaggtgtcgatgttcgtttacaacaagctattacagccattaacgctgaccaacatacggttcaggttaaggatttaaaaaataacacaactcgtgaagaaagttacgataagctcgtcttaagtgtcggggctgtgccatttgaacttcccgttgctggtcgcgatttagctaacgtttatgcaatgcgtggtcgtgattgggcgattaagctcaaggccaaaacggttgatccaactgtgaaaaacgttgttgtcattggttcaggctatatcggtatcgaagctgctgaagtctttgccaaagctggtaaaaacgtgacagttgttgatgtcttaccacgtctattgagtttatacctcgatcaagaatttacagatgaattaacaactgaaatgcaagcccataatatttatccagcagtcggtcaatctgttaaggaataccgcggtgctgacggtaaagttactaaggttgtgacggatcaagccgaatatgatgccgatttagttatcgaagctgctggcattcgtccaaatacagcttggttgaaagatgtgcttgatttagaccgtagtggtcggattaaaatcaatgaatatctacaaacgagtcaacctgatatctttgcggtgggggatgcaacggttgttaaatatgcacctattggcgaagaaatcccaatcgctttagcaacgaatgcccgccgtcaaggtcgctacgctgctaaaaacttggtcacagctgaccaaccagtgccagctgtttccggttcgtcagccttaagtgttttcgattatcactttgcttcaacggggattaaagaagggactgctgataagtcaggggttaagacacaatccgtcgttgttacagaaacttatcgtcctcatttcgtcccagctgacgaaaacccagaagttaaattcaaattaacattcgatcctgaaacaggccggattttaggcgcacaaatcatgtctaaagcagacgtcacagctaatatcaacgctatctcattagccatccaaggcaagatgacggttgacgatttagcttacgctgacttcttcttccaacctggtttcgaccggccttggaacatcatgaacgttgccgctcaaaaggcacaacgtttgatgcattagtaaaagcgaagcgcgtgtgtcaccagttggatatctcctgaggattaatattagactatcaaaaaggtgttgcggtgaaattaatttttgccgagataccttttttattttgccaaatggtagattgtaaaattaatccgaacgctgttcggacaaaaaagatcagcttcctttaaaatggtgtttaccacaaacccatcttttaggagctgatcttttgtctagtataacctattccgaacgaattaaaatcgaaaccttttgtgaactagggctgtccaatatccaaatgggcgttcggctgaaccgatcaccgtcaacaatttcttatgaattatctcgatgtcaaccttatcaggctgaattagcacaaacagatgccgaatacaagcgatcacgatgtggtcggaaaactaagctgagcgatgagttaaagcaaaaaattctcaaccatttacgtctaagctggtcaccaggaatgattgctcacgaatttaaactagctactaaatctatttataattggctaaatcaggggagaattggtttctccttgaatgatctacctgaacatggcgtacgccaacggcgtaacgttgaccaacgatccaaatataatcaatctttggggcgatcaattgaacagcgtcccatgatgattaatcaacgtaagcgcatcggcgattttgaactagatacagtcgttggtcctcgtgggcatagtaaggcagttttattaactttaatcgatcgcaaatcacggttcctttgggcataccggttaaaagatcggacgacagcgactgttaatgaagcactaactaagttcctaaccacttttaatggtccggtgcacagctttactgtggaccgtggcactgagtttagtgggctagtatcacttgaatcacaatatggtattaagacctattactgccatgcttatactccagctgaacgtggtagtaatgaacgctttaatcggaatttacgttatttttatcctaaagggactcgttttgagcacattagtgctcaagatttaacgacgacgttactccaaattaaccagcgaccgcttaaaatactcgactggcaaacaccgtatcaggttatgctgacaaatttgtccaaaaattcggattaaatttgcaatctaccaaatgacagcgtataatagaaggaaagtgacgggagtaaacaaaatgtcgatagcttatttaatcgttatcacactgctttatattgtgctttacattggtactcgtagacggggaaaccaggaattgattaatgtcctaataatatggcaagtcctgattatcgttaatattatttttgacacaattggacatgaacaaagtatcgatggcttatacaaggcggtttatcccatggcactgtcgttcttttgttatttggggaaagatatgtttaagaagaagtaggaaggtacatgatgcaacttaatttatggcgtgcttttaaaaatgcctttttctttttaagcacaatagtgattgcaaaaattatttttaagtggtcagcttttcgtgaactctatgcaggcggtagtacggaattaggaggaatgggcattagcattatttttctaggtgtttacctagggctattattattattgaccttgcttattttcgcttatctacaggtaaaacaattatttaaaaaatagggtataaaaaaacgaccagttagctggtcgttttttgcgtttagagcattggtaaaataatagttgtccatagccaggacagcggcatgatgacaatcatcgccggtatcatatccgcggtcggaaacatttttagctggaccattctaaagccagttgcgagcatcaaaacaccaccagcggccttaaaatcaaaaatcattgaaggggttgtgagggggtagattaagtgtgctgcgaagaatagggcaataaagatcacgaattgcggaatggcaattaatgaaacgacaaagcctaagtttgcggcgaaaatagcggccgtaaagaaatctagaatcgatttagaaattagaatcgtggcatcgccattcatcccttcagttaaagaaccataaatcccagtaccactggcacagaataaaacaatgacggtaacgagggttgcatcaaatgtttgccgatccaagccagttggtgcattgatgaagcgcgagatgaatttttgcatttgtacggcaccccgattaatccagtcacctaagtgaatcaataagccgaagccagtcccgataataatggcaaaaatcacggctgccatgtttttcataggtgcaatggcgtaaatccccatggtcattgagcaaaccccaaaggccatattgagtccatctttaaagttggcggacatctttttaccgcccaaagcgccaaaaataccgcctaataagacggatagggcattaatcataattccaattggcataatagcctcccatagataattagtaggtaaatcaatatttaccagtttactggtttaaaaaaggcggaacaattccaattttgtgctaaaatattccaaatatgaatacgttggaggaaagcgaatggatactcgaaaattggcaacatttatcgacttagcgcaaacgtgtaattatagtcgaacagctgaaaacatcttttcaactcaggccacggtctcaaaatatatcatggcgcttgaaaaagactggggggtcacgttatttacgcgtgaccacagaacagtaacgttgacgaaagcgggcgcggccattttaccgggtgttaaaaccttaattcaagcggagcaacggttattacaaaccatcgatcagcagattaatcaaacggaccaaacattagtgattaagggtattccaacgatttcgcgctaccaagcttttcagttaatttttcaatttaatcagcaacatccagaaatcaacctcaagtttagtgaggcagagacaaatcaattaataccgtctttagatgatggccgggcggatatcgtgtttacccgtttatttgaaaaaccacaggctgaatatgcggttttaggcgaggagcgggattattttgttgcgttgatggcgcgtgataatccactcgcacagcagaccgcattgaccgttcaagatttagcccacgagccttttctactattggatggggcgacaaacgtcttagcaccggtgatgcagaccctcgagcaagccggtgtggcaccgcaaatcgtctatgaaggccggcgagttgatttaattttggagatgctgaatcaaaaaatgggcgtttcaatcatgatgaaccattcttttgacctagcgggttacgaaaacgtggttgccgtcccgattcatccaaaacaatacagtcagttagcctttattaaacgccaagcaaatcaatcagagtcagtgcgtttattctggcaatttattcaggaaaattagaaaacgcatctattccaatttagaatagatgcgtttttagtttgaattgttcgcctgcgcgctttgtttaataatggttgtattcaatacgccaaggaggcttatttatgagtgaacaaccttatgatttacgtaaagtattggctgaaatcaaagatttaccaggccaatatcatgaaacggatgttgaaattgatcccaatgctgatttagcgggtgtctatcgttatattggtgctggcgggacagtcatgcggccaacaaccgaaggcccaacaatgatgtttaataatgttaaaggcttccctggaagtcgtgttttaattggcttgcaagcttcacgccaacgggtcgcaacgattttacatcatgactacaaaacgctgggtcaaatgttaaacgaagcggtaaccaaaccagttgcccccgtcgaagtgacacgcgaacaagcaccagcacaagaagtcgttcatttagcgagcgatgctgattttgatatccgcaaattattagcagcaccaaccaatacagaagacgatgctggcccatatatcacaatgggtgtcgtgtatggtcatagcgttgatcaccaacaaagcgacgttacgattcaccggatggtccttgaagataaagatacaatcgggatgtacatcatgcccggtggtcgccatatcggtgcgttcttaaaagaatacgaggcaatcaacgaaccaatgccaatcaccattaacattggcttggatccagcgattaccattggggctacttttgaaccacctacaacaccacttggttacaatgaactccaaattgccggtgctttaagaaatgaagctgttcaagtagtgcctggtgtcgctgttgatgccttagggattgctcgtgctgaatggattatcgaagccgaaattttaccaaaccaatcaatgcaagaagatattaatacgaattctgggtatgcgatgccagaattccctggttataacggttcagcaaatcctgccgtaaatgtgattaaagttaaagcggtcacccatcgtcaagataatccaattgttcaaacgacaattggtccttcagaagaacacgtttcaatggccggtattccaactgaagcatcaattttgagcttagtggagcgcgctattccaggtaaagtattgaacgtctataacgcccctgctggtggtgggaaattaatgactatcatgcaaattcataaggataacgaagccgatgaagggattcaaagacaagctgcgttgctcgccttttcagccttcaaagaattgaagacggtcatcttagtggacgaagatgtcgacattttcgattggaacgacgtgatgtggaccatcaatacacggttccaagccgatcgggacatcatggtcttagaaggtttacggaatcatccattagatccatctgaattaccagaatacgatccagctcggattcgtgtgcgtgggatgagttctaagttagtattagacgggactttcccatatgacatgcaaaagagtttcaagcgtgcgcaatttaaagaaatcacagattggcaaaaatatttagattaattagaagaaaaggggaataatatgcgtaaaatagtcgtcggtatttcgggtgccagtgggacaatttatgggattcgtttgctagaggcattacaccaagtgccagatgttgaaacacatctggtcatgagtcgctgggccaaagaaaatttagccatcgaaaaaactgggtacactgaaaagcaagtcgtggcgctagctgattttgtccatccagagcaaaatatgggcgcaacaattgccagcggtagtttcaaacacgatggcatggtgattgtacccactagcatgaaaactttagcttcgattgcaactggacttggtgaaaacttgattgccagagctgccgatgtcactttgaaagaacgacgaccattaattattgtgccccgtgaatctccttttaatcagattcaccttgaaaatatgttgaagttggcccaaatgggtgtggcgattggtaccgccgattccagctttttataatcaaccacaaacgatagatgatatcgtcaatcatacggtaatgaaattattggatcaactgcatatcgagaccaaccttggttcacgttgggaggggttagctaatgcacgtcaaaacgctcgctagtaccgaacaaaccgtacaatttgcggtcactgaaacggattatacaatgcacttaaaattagagcgccaaacgtctgatttattaattcagattatcggtggcgacgtgccccattacggcgtcatcacgacggtcgataaaacgggtaaggcattgaccacggcacttcctagccgcccaggacatgtccatcaagaaaaagtattaattgatcaggttttaaaaactgttaagccactgattacgaataatgcggtcttagtgtctgggatgcacgtcaatgagattacaccggcgcaaatgcgcgcggcaatgccaatggcacatgaactaggagtcgctttagccaaatggttaaaagcacatccagatcaaacccaagtggttacctatgctaaataaaaaaagtcatcattttaatgatgactttttttattatccaatacccatcacataaaatgctaatttatcggcgtaatgcggttttgtgtgttggttttgggcttgttcaactgctttgagattatcggtgatcacgccatccgcaccaaaatacatcatccgttggactgcctgttgatcattgggtgtccaaacaaagacggctttcttttcttgatgcgccgcttgaataaagtgccggttgacagtcgtcatttcaaccgcgtagaaatcggcgtgtgaaatgggtggcccgatgaaattaaagggcaggatataaccggtttgaatttgcggtgctgcttttttgacatcttctaccacttgccagttcaaggactgcaccatgtgatcgtgagtttcaatgttagtttggtatttagctaggaatttttgcactaagcctggattatcggtagttggtgttttaatttcaatcaagagtttttgatggcgttggttggcgagtgcgagatagtcgtcaaatgacgcaattggtgcggtgcgcttatgttcgcgcactgtcatattggtgagttgcgccagtgtttttgattgcggtgtgcctgaatgaccagttaacggcgccagctgaaagtcatgaaagacaacgaattgatgatctttggtcagttggacatccatttccacgtagtcgggttttaagcggtgcgtttggttgagcgcagtgagtgaattttgaacgccatttttttgagagacaccgcggtgtgagatgctgattggttgttgaattgatacggcgcgaaggtaatcccaattgtaaaagccggcaccaattaaagtaaccgttgctactagcaataataagccgctattgagggggacactcagtttgagactagaatagttgattgcaggccgattaaattgtgaatcggatagtagataatcaaccagtacgaagaagatggcgacagttgagaggaccaggttaatgaggacgaccacttgtaaaagtgtcatgagtagaactgcactttggaaaccgacgctggtatgggtttcaatgaacgcctgaagctgaattaataagaagaaactaacggctgtaaaaccaacgaggcccccaacgatgagtaacaaccgaccaactagggttactaattggtgatgcgtaaagcgccagctcgtccgtagcgctttttttaacgacatttgttgaagaatgatattggggagggtgaagatgaggcgcaaaccaatatataacaagctcagataaatgaggaaccccaaaacggcaatcagccgtcgattggtgatgatgtaatctaaaataaaggcgggcaatttaaattttgtcaataaatcggagtgataacccaaaccgcccaatgggataattaggatgtaataatataggaagaaaaaaatggtgccgatgcgcagatgcgtaatttgggcgaccgtcatcttaagtaatgcttgcagggccagtggtcgtttaatctgaataaaatacacacttaatagtagaaatgtgaattcgaagaaggccagtaataaaatcagtagtgcaattcccacgagcgctagaagcgcaaaggggtgctggtgaataagtacgggcagattgctcaacgctaaaaactgaatctggtaatgtactaaaatgaagtagctggctttacttaaaagcggtaggcaaattaaaagtaaaaagccatgcattaataaaacactgcggaaataagcttggctttgttttaaaaacgtaaaggtatttaaaaataactttttaaaatattgcattaatatagaagctcctcaatagaaacgtttataaggactattgtacaacaaaagaagggttgagtaacaatcgctacttaacccttctttattaatcatttaatgaatagcgtagtttcatatggttagcgccggtagttaccatttttccaaggagctgattgaggttcatgaagtaagcatcagcgagcgcttggttagcggcagtgagttgcgcggtgctattttccggattagctaaaattgcggcgtccgttttgagttgaatcttgcgacaatcaattaatgcttgggcttcaaaagcatcgcggagtccttgataacgattgaagtcagtatctccgagtagggctgttagacgatttaaccagtaaatattgttaggatcaaagctggtttgtgtctcacgataaatggccggcgtcgtatttgtattggcataaaatggcactaaaccgttaaaggtgttggggccaaatgctaaccaatgaatcccggcaatcgcttcggggacatcgttgcgaatttgcagaatatgcgtttcttcatttcgatttaaaccgattgtccggtagtgttgacggtcatcttttgaacctgtgccataaggatcaaaaggcgtgttctcgaaatgagaactgagggcccatttaacggcttcaatcgttagttttttagtggggaccatcatgaagggcagttcttgatcttcatagtcaccctcatcaagaccaccaaatgcttttaaaatggcataagcgcggggattattataatgagaatccttgatggttgctgtaccaaagatgtggcggaggtttacttgatcttcatcaggattgagatggtattgcgcaattagacttggtagatcttttgagaatagcgtatttggtgaggcaaaatcgaatccagcaatgttgagacgattaggcgcaacaacaaaggcgttatctgggatacgaattgctgcccagtgatgcccgccgattgtttctaaataccaaacttcatcgtgatcggaaaaagcgatgccgttggtttcgtaagtgccataggtttcaaggagttgacctaaacgtaacacggcttggcgagctgattggctataaggcagaacgagcgttacgaaatccgcttcaccaatcccgtcatcagttagcggatcaatcgctaagatatggggattgttggtaattgtttcgcatgcagtcatcgcgacgttggcgctattaatgccggcaccagcccaaataccatattgatcatcggcatcgggtgtcgaagtgtaacgtaacggacttgttggtagtttgattttgagcccattaatggctgaggtgtaatcaacgggttgatcggctggttgaataacgcagaatttttgcggattaggcttgttgtagccatcctcatttctagcgataagggttgagccatcaagcgaggccttttttcctactaaaatggttgtacaagaactgattcgtttattcaaaagaaggactccttcaaggtttattattcattataagccaatcgctagggtaaaagtcattaaaaagtgagtaactatttaaaaatagcgattactttggtatagtgtcagtataaagttaaagggatttacgaataggatgcttttggggggaacaagatggcgaagtacaaaaaggggccaattatgacgcaatgggaatctgatttttcaaaagcgcgtgctaaacgtaagaagacactaatcatccagggggtggttttagtgttgattgtcgttggtggattaacttggtttatcagaaataacaacgctagccaaagcgttgcccaaaaagggtcaacgcaatcgggcgttttttaccaaccctcttctgaacggacgaaagcggccagtgatgaagttgtgattaatgaaaaagattttaaagcatcggccagcagtgctgctgcagaagccgataatcaagatggttgggatggtgtctatccagataaatacgttaaaggggcactgacaaccgattatatgaatcttatcgcgatgaacaatagtgggttgcgctggttgcaggggaatggctaccgtttattgacggaaagtgaattcttcaaagaaaccggccaagcagcacaaaataaacaaaaaactgacatgaaaaaagttgtcgtcagagatccgggcacgagcttacccgctttaaacgatgcgtatggccatccgcgctactcatatttctgggcaacaaaagctcaaaaagccccgtcgatttgataaaatcaacggggcttttttctatgggatatatatgcgccacccgggaatttaaaccataatcaaacctagtagaaactggcattaacaatatgcctaaagtgttgatgtacaagggatttctggaagatgaggtggggcaaactttaggtattcttttttgaattctctgcactttttctgcattttctgcacgaaatctgcacgtcgaaatctatagattactcaaaattttgagtgctttttcatcttcacgttctcgacttgtttgtagaagatgcgtatagacttcataagttacgcttgtatttgcatggccgaggcgttcagaaatataatcaattgagacacctttggcaatgagcatggaagcatgtgtatgacgtaagccatgaaaggtgatgacatttttagtcttcagttcaagtagtatttttttaagtgttttgttagctgcagtgtcgctgggaatctcgtggcggttggacataaagacgaaacctagtttgtttttaaatccttgttttaaaaattgactccgttgctgaacctgcagtgactttagaattttagcaagttgcggtgtgattgatattgttcgatttgatgtgatcgtttttgttttagtgaaaccttttcgagttttataatcataggccttattaatcgtgatggtgcgagcttcaaagtccacacaatcccaagttaagccggcaacttcgccgtaccgacagcctgttagtaaaccaaatagtatttcaattctagtgaccgccataaaagagccggtttcgatacatagtttttttaatcgttctgcttcgtcgtactccaaaaacttcaggctgctgtctttagattctaaaccagtaattaatgcgccaaaggtaaaatcacgtgtgagtagtccatcgttaatagcatacttgacggcatttctaaaatagctattaagcaatcgcgtgctgtccttgacgtgcgtttcagcgtattgatctaacatcctctgataatcaacagacttaacattccttaatttaacgtttccgaaattcgtttcaaccagcttgatggcaactttatattttgattcggttgtttgatgtaaacgcccaatcttataggtcttagcccatttctcgaagtaaccagcaaaggttgcatcggtgacagtaactagagtaccagcattcttcattagttcgagttcttgtgcagctgctatggcatctgattttttcttgaaaccactcttttgcttgttgtgtgttctgtcaattgaaactcgataaccccaagtaccattacgtttaaaaatttgtgccattgttaaaacctccattttaagctaaaatagagtacgcaaatagcgcacaacattttgcgttatttctgtgaagcacatccaacttcttggcgggaggggatgtgcttttttatatagtatgctgacgaatataatcctcagattttttactaagtaatattttaataattgatattcttctataataaacatggttaaataaatccggattatcctgaacgaaacaattttccaaaattatgtagactttatatatctctaaataaagtctactgcgtttctttggggggattggctcaggttttaatagctctgatatatattcagttagagaagtatacttattatggaagtggacatctgttgatagttttttataaagacttttaaaaaaagaagtttggttagtaaggttatgttcaataatgaagttatctaataatttccaatcataatgtacgagtggtcgatcagactgttctattaaacgaatgtaattttcaaaaatagaacggaatgtaaggtttatagggcgtttatctgatacaattgttaatctaattaaatctatgcaatcagcctttaactgcctttttaattgttcattaaatttagtatcaagatttagcaagtctccaaaaaaaatagattttttaataaaaaaagtaaaaaaacttatatcatcttgtgtaggttggaaaccagatttttcacaaaattctttagtgattgctagagaattattgatttcattacgaacttcactcacagcaattctacttaaattattcattatcactaattaccttctgaataaatttaaatagattagatttgtacacccttatttcgctgtctgtggcgttgtgaattaatcttgataacctagcaacaatcgttgttctagaaccaataacatattctttatattcaacatcaaacgtttttaatagaaaagaaggaatatctgaatttttactaaatatttcttttgagagaattaattcagaactaattccaattaatttatatgtggggacggtagaattttttaattcatttctaagaataggtagttgttccagcataaatatcactccgttcataaactaggatttaatttttgttctagctctagaaaaatggcttccatatcttctttagaattcttatatgaaatgggatttgtacctgatttacctgtttgtatagctgacagttcgtgcatcgttgtatcaaatatatcaagagagttaacaactcttttagactcaaaacttatctttatggcttcttgtttctttgttagattaataggaaccatagtatagataataccaagacatttcaaatcaatggtagattcttctattagattatcaatagattgttgtagagagtcaataccaactattgaatatctatcaattctgttggggataatataataatctgaagcaatgagtgcgctgtcagtgtagatagttaacgttggtggacaatcgataaagatataatgatatttttcgcgtagtttattttttttaataaaattagtaagacgctgagtaaatttataatcggctgatctatttgctagtactagagcaagatctccgcagaggatatctaagttagatgtcagatttgtaataaggtcttcatcagaaggagtcgagtagcgctgatgtacgctagtttgaggtgaaaatagactaaaaatagttttattattctttgttccttcagatggtgtgataattttattgtagtaattgaactcagattcatctatatcttctaataaaaaattcttatcaggagattcttcacgaagtctaactagttcatcattttgtattttaagcgtttctgtattcttgtaatcattcaaaagagattgggttgcattgaattgtggatcagcatcaataattaaaactttcttatttttctctttagcgataaaagcacctaatcctatactaagtgtagtcttcccaaccccgcctttcatattaataaaactgattacttttccatgtatgctattatctgtatctgtcaaaattatacctcctaaaagtatataagaacttttatactgtttatttataaaggatgtcaccctgtccaccactgatataaaatgaacatactaattcatattaattttaaatttagacacgccaccaatttcaccatctttatattcaatttcaatatatttcgtttggctaacaggtttgttcagattaacccagaaatgagttgttccggtatggccttcagtaacttcgtcttgaccatcttgttggcttagcatttcgactgttttaccttcatcatcatagacggtgaagtattgtgtacttgctaagaaggggtctgttaaaccgtaattagtgtaatctgctgtaacttgcaaacctttatcttgtgaaagattcatgctggcacccatatcggattgtccaacaagtgtttttccgtgatcgttaaagttttgatcagcttgcgtaattttaataccatacattttatcagtaccatttttagcaagaatagattcctcattaaggccgtagacactttctttttcagaactatcactactctcatcgctacttgaactagaaccgccagataatgttgagaataattgcttatactgcttgttttccttaactaattttttattcttagcgattaatgattcattctgatcactatagactaaagcgtcatgcatgaaaaatcctccaagtactgcgaccacgatgaacaaccaaaaccaaatactcttaaaaaatttctttttctccatggatatctcctccaaatatgttaaaatatacacatggttgttgctcttttttatttttatcggagtagcatttgcgtcttacttccccacgaagtagggcgctttttttatgcgaagatttcgtctacgtgctgagcgacgaatgcttcaatctgaaagtagtacataagaggaattcgatagtaatccataaaagtattgacattaaaatgcaacttatcaatactccattgatttataaactctctgactaggataaagaatgcgccgttgttagccattacttcatttttacgagtcgaaacatagctacttttataaaacgcagctgattcaacgcccattaacacgtgtgttaattcatgtattaatacaaaagtttcaccaacaggtgatggcgcagtattgatgaatatcgttctagttcttggaacagcaaggcctagaagtgtttctggcatttcattagttctaacaatatcgatattaaattcatttattagcttttgatagtcgaataaattatgattaatcaaatattgttggaggtcagatgaatcattaaatatggccatctagatcactcctttttctgatcatcatcaaatattctatggcgccctttgttccaatagtaagcagcaatcatgctatcaattgcagcacggtcttcaggggtcactgattcctcagagtaggtgaggccggcttcattattaataatattttttaattccttagtctctttttcagttgcgtttttaggcgtttgatttctacctaatagataatcagttgttacatcaaagtaatcagcaatttttgtgagtggttcgatggatggattttgtttatcccattttccaatagtaccgttagcgatttttagagttctttcaagctcggctattgtgatgtgatgctcactagcaagctctttgactctttctttcgtatttgtcatctggtatcctccaaagagtttgcacaaaatagatacctaactattgacaattagataaacggctattatactaagtgtgtacttatgagagggtacaaatagcataacggcacatctcactaaataatcagtgggtattaatgtgcttatttattatgccttaatgatagccaactatctaatatatgtcaatggttattagacgtatttctataaaaaggaggggatattttgatttatgagaatgtaaaacgagttgcagatgcaaaaggcgtgacgatttatcggattgagcgtgatacaaaaatcgccaatggaataattgcaaagtggggaaaaactgctaatcaagaaccttcagctactaacctaaaaaaagtggccgattacttggaggttgatatgaacgagttgcttagtgataaacaggaaactcattaaagttaacaaaatttctttttccatttcaagggattactacgttactaatagtggaggtgatttagggatgaagaaaaacgatgtgattagagaagcgtacttaactaaatttgagcgaaataattcactggaagagtttggcgtttctgatggtgaaaaaatagttggaacaaaattagttgatctaatgaaaaaagaagacttaacgtatgattcagcgtacgccagtcttcaatatgcttataacttattaaagtatgaatctaattttttgaagcttccaagtaataaaaagtattagaggtgatcagggatgaaaatagttagctacttaatagatataaaaaatgcgctacaaacaattgccaattgcatgcagcgccaaaatccaaaaccattcgactttgatgaagatttagttgagctaattggtaaggaaaaacttaaaagggtgatagcaaggttagatgctacgtattacgaagaatgcggtgtattaccagatgactataaatttacgatgactcatagagaaggtggtgcacatactttaacggtaggtatatcaaaagagtatatcaatgaaagatttaatggaactcatttcataactgaggtccaaaattccaatcaggattaggcgctaaggatttatcacgtgcgactaattcagtaatttctacggagaaatcataagtattaaaggttgtattgattgagaggagattttcaccaccaatattaatcgaaggtaattccttttcgtataacggccaaactaaatagccctgtagtgattcgaaagggccaagcgtgattgttggcgtaataatgtgtgaaccaactggaaaaccttccgtcaggtctctagcacccataactatagttcctttaataacttttttaccattcagagtgtgaacctgatagttgctagtcaatttcgtataggagtttatttcatggccattgagattaaatgagattaatgaaatcggatttgaactcttatttttaatgataatttcaagcagaattcggtatcgccgatctatatatatatcaggattatatttttcatcaaattcaggttcaataacgcaagccgtatgaggtctatgtagttgttgaatagctaaatgagggcgagaaacccaataatttctagcagaaagaataaatgatggtactgcaagggctgaagcagcccaagcgatgttgttaccagtgaaaagtgattgaatatccaaagtaaatcatctccttagatggagtatatcagacattaattgtctattacaggaggtaagacaatggaacgtactaaagtaatcgtcccacagttcacaatagagttaccagctggcatggagttaattgctactgaagacagagagcgattagaagctgatcaacagattatttgggatttaaacaaagcctgcgaggtttccggatacactcgtgtggatatgactaaaatcctgcaggtgtttaaaaaacaactcgatattgataatggcggatgtgttttttatccatacgccggcggtaaatacagaattgaatcattaaaatttacgcgattcttgcggaacaacttcccaagaattatgaaggagttgaaatcaaaatgaataaacatatgtatttagcagttatgttcagcattgttttaggtctctatattccgaaggacatgcaatttatcgcgacagtaataatcatgagttcagtcatcacttttatcggtgttaagcataaagaatttttcgaaggaggcgacgacgatgaacgaactgattcagacgtttcaaaataacgatggccagacggttgtcagtggtcgggacttacatcgcttcttgaaagttggcaaagacttctcgacctggttcaaagatatggtggcatacggctttacagaggaaagagacttttccccaatttcggggaaaagttctggtggtcggccgcgcatcgaatacgcaatgacaatcgacatggcaaaagaggtttccatgatccagcgcacagaggttggcaagatggcccgtcaatactttatcgatatggaaaaacaggctaaggctttaccgatgtcaatggaagacatgatgatcaaccagctgcaggagcaaaagaaaattaagtcagatgtcaacatgttaaaagacaacatgcggattacgtcggctaatcaattcacgctgcaatcatatggtcgcaagcaagtcgttagcattttaggaggtaagaaatcagctgcttatcagcatttcagcgctaaagccttcagccaattgtggcgcgacttcaaacaagcatttagcattccgcgttatagcgacttaccgcaagccaagtttgatgacgggcttgaattcatcgagaactggttaccagataccgagttgagaatgtcaattcaacgcttaaaccggaacaacatttttcaagcaattaattaatggagggttttaaaatgaacgacaaattaaaaaagccgcagaccttttcagtctgggctaaagcagaatatgcccaaatggtagcgacacagattcaaagagatattcaaagtcttttcggaatgacacctaatatcgaagttgggggattcgccagcgacgacgatcggccaattcgcattaattattatggtagcaaaacagaggttcaatcagttaagaaaatgattagcgaccgctatgaactgagtattaataatgatgagttctaatcaaaatttaggcacaaaaaaaggcctcaactctcacgagtcaagacttcaataattcatccgataactgaattatacagctgttaaggcgttgaagtcaacaagtgagggggcggcttataacgtgcttgtatgtggtattaacttaagcgcgttttttaggtggtgtaattcaaatgagatttatgcgagagaagaaaatatattgtgggccagattatatggaagtggacatcattcctcgaacgtgggaggcagacatggttgccaagcgcggcacacgttcaaaaaagaaacgggagtccgcacccaagcaacgtaatctgaatgaaaagaatgctaagcgatacttgcgtcaacttgggaatggtaatttcacagaaggtgactggttcatcagtttgagctacaaggataagtttcaaccggaaacaatggaacaagctgaaaaagaggtctctaactatatccgcagactgaagaccagatataagaagttagggcaagaactcaaatacatcctggtcaatgaaggtggcacgacttcagttcgattcaaccatcacttgatcatcaatagtgtatctgaaggcttaacgcgtgatgatgtcgaggcactttggtcaaagaaacctaagggacagcctcgtgaacggatagggatggtcaacactcgttatatccagactaatgagaacggacttgaaggaattttgacctatctagcgaaggacccaaaaggtagaaaacgctggtcatcatcccgtaatctgatcagacctacttcacggccaaatgatagtcactatggcccaagaaaaattgaacgagtagcaatgactcctgatcaagggatgtcttattttcaggagcaataccctaagtatgagattagtggattagaaacaaaatattacgaagaaactggctggcacgtctatctgaagatgtggcgccgtacagggaggattaatagatgattgacaactttctcagagaaatcccaattgagcaatttgatggatccccaaggttgattgaaaaatatgatatccatgtcacgcaatcagggatattaaacataaaagtgaatagaactcatcgcattgaaatcaaaaccgggatgtgggtagcaacaattaacgaaggctgctatgtgactataaatgattctgaaatgaaaaaattgatatgagggggactaatgatgacaacaccagaaattaaagtaccacgcgcttattgcattggtcgggttcaagatcatgtgattcgagaatacagtttatttttatataacgatatcattttggcgcaagccgattgcgattcattgaatggtgccgataaacaattggaccaggtcgagggatgttggacagtattggaatttggcagaccgatatttgtgaggtcgatataaacgtttgatgattagttcatattggccaattatgcattaatagtcaaatgtttggaggtgcgttaattgaagatagataacaaccgtgtgttctgtatcaatgattataagtattcattatttcgagaaactgatggtcgctggttcatttacttgcgagggcgtagttggtttgcaggcgcggattcatcgcttaaaaacgatcaattaaaacgggtcaaaaaccacggattaacctatctaggtgaatctgaaacaagctggtacgaactgccggaagatgattttgaacgcgaaataaggccgtttattaaaagtcgtggtcagatgagtttgtttgattgaagcaaacatagattcagaaatctaaatatttggaggaacagtaattatgcaacccattattattcaactcgaagagaaatatattgatctcgcacattgcgtgagcgactacgggtataacggggccgttgaacccagatgtgggaataacacgtgccaatctgaattggaccatttactaactgactggttagagggagcaaatgacctgcgtgacatgcaagcttattttgaactgaagaacgctgaatttgaacaactacttgcaggtatctttattgctgatgaggttcaatatgtttagtttggaggcatcccaatgatctatatcattttatttctcgccaccgctggcatcccattcgttaaattaatcatgggatgtatcatcttattcgttttatcaggcctattcatttatcgaaaggagacatggtaatgattaatacgagagttcaagttttatccgagcacttaatggctgggcaacgcatcacgctagaagcgcttatgcggcacctgcgttgttcaagaaaagaggccgttgatttattggaacaagctactaatcgaatggaggaacaattagatgctagagagattcaaaaacaaaatgaagtcgctgctaagcggcgggcgcaaagatatttcggtggatcatcaggataccgctcaaactcatatcgatagagttgaaattggtatcagtaccgtcgattttgccaagcagcttgaagcaattaaaaagatgcttggtgggacgagaattcgtcttacttacgctgaaaagcacctggacatgacctcatatcagaagtggcacaaacctaataagaaatggagatagcatgatggctgaacaactttttaatttcgatttatcaaaaatcgcagatggtggcgctcaagaaaaattcaccactgaattgcaaaaggtcgccgataacattctagacttgaacactgaatcaaaaacaaaacgaaaggtcacgattgatttgaccttcatccccaatgataaacgagatgccgttgacgtggcggtcgatgttaagtctaaactagcgccacagattggtgtcacgacaacgatgctattgggccgcaacatcgatactggcatggttgctgtcgctgaattgaaatcaggtgtgccaggacagacctattttgatactgaggatgaaacaatcaagacagataccggcgaaccgattgatgacatcgaagcagatagttctaaaaaagataacgtgattgatttacaaaatcagggctagggatgagcgatatgaatcaatgggatgaattaccagaagtcgaagttcttaaaagaaagatactaatcaataaaaaagatttattcgaaggagcatattatattaatccgacaagtgaagaaccatttcatgatacggaagatgtgtatgatgtggcattggtgtcagacttgattgaaagaaatataggtgactttaataatgttgcctatgctaaaacattaatcgagactaccaactatcctagtgaccagttaatccggattgagggctttgatgatggcacctatttactcatagaaatttggcattcagataacgaagatggctacggcgctattgttagtgaattagttgaaaattggaaagaattaatttaggaggaatacaatatgctatttacttacaacggtgaaaaatatgatacgtataagaataatggattacagagaacacaagatgatggcttgaaattgaaagttgttaatgaatattttgatgaacctgatcaagtgttaaaagagtgtagtttagatatcgcttttgaattggcgctaatgtctgcccgttatgaagatatcatttcagaagtaactggcggggaattttcaaaggctggtacttatcctgaatgggtcgtcaaagaaacagaagcatactttaaagaattatattcggaggatgattaacatggaaatgacaacagatacaatcaacagattacacgaattgagtttggaagccggtaaggggaaggttattacggttgatcgcgagcacttcgctattgacggtaacggggatgtccgcctgcttaaaccgcaaaatctatctgatactgcagttgaggtcacaacgctcatgggtgtcgtcgacttggttaaaagtatggatgagcgtaaaacgcaaaatctttacattcaagttaagtcaccaatcaaggtgattgtcttcggccacttagatgagtacggtcgtcgtgagcagctggttcgggctaaagccatgacacctgaaatttattacgggaactttttagatcaggaacaaatgaacatctcattgcaatcgcagtttgaagaaacaaaggaccgcaacattcttttgaaagtgattggcaacctgaaggaagaagctgttcgcaatgccagtgatgacggcgtgagccaagcagttacggttaaaactggggttgcatcggttgatcaagtgaaagtgccgaacccagttggcttggcaccataccggacatttaacgaagttacccaaccaaccagtaacttcgtattccgaatgcgcgaagggatgaagagtgccatctttgcagcagacggtggtgcctgggaacttgaagcaatgagcaacgtcaaagaatatttaactagaaatctggatgaagaaattaatagtggtcatgtgattgtgattgcctaagggggaaattaaatggataatcaaagttttatttcaaaaagcaaacaagccgttgtggattatgtaaatgaacatacggatggcggtacaattgatagttatgaagtttatgttgtttggttagtgcgagtgttacagaacaataaagcacttttaagcacaccggttccagacggtagatactatgaggcgacattcaatggtgataaaaatgaaatctatctggatgtttacaagaaagaaaagaatatcgatattaatctttaacgggaggtagttccttgaaaaaacgacaacgacggaaactctttaaacaaatgatgaccttcttgaaaaataatgggttcgcaataattgacttgaaatcaattgataaaaatttagttacctacattagcagtacacattgggaaacaatagaacattcattagtcgatgaccagtcaggctgttcagtgcgcatagaaggaacctattctgggggtgtcaatttggagaagatgtttgaaagaaaggcaagatttaaccagcgattaaaattggagtgattagatgggaattgatattaaggatttaacaactgaagcattgtctgtgatcactaaggaagtcttgaaacaggatgctaagcataagaaaataaccaagaaaagagagcacgaccggcgcttgcgaaatactaatctactcctgagtaactaccgtaagttaaagctgcatattaaaactgattcgccaattgatgcgacactttcttatgaagttggtaacggtgaaacaattcagttagattctattgctaagtatcatgaaaaatcacggatgatgttgcgttatctcgatgcaattttagctggatataaagtccaatgcgagagtggtggtgaagccgaatatcgacgctatcaagtgctaaacaagtactacttatccacaccccatttaagcattcctgagattgccttgttttataattgcgataaagcaacaatcagtcgtgctaaagccaatgctatcaacgatatatcagttctgctatacgggtttgatgcattacaagacattgttgaacgttgattgaccgtgcaacaaatctgcaacaacggcgcaacttttaagttgtacaatgatattataggatattcagttgagggaatattcctgatgaaaaagttagtcagcatcgcgtgggtctcgccagaaatggcgggactttttgttatggtaatttaaagttactttagttatcatagaggagtacaaaaaaggagtgctttaattgaagaaccgtgacagctggcgtataattaaaaatttttgcttttggatagttattggaattgtgcctccgattctacttaattttggaatgtctcgttttacgagtattggaagtgatgatggttggcttggattttggggtggttatcttggtgctgcgattacagtaattggggtatatgttcaaatatacatgggaaataaatctgcgaaaaatcttgaagcactaaaaagtagaccatacgtgtatctaaattcagaatcagcaggtatatataagcgagtatactttaagaacaccgaggacagagataaaatcgcggaattgtttagaaaaggattcacagacattagtatggatggtgaacaatatattttttaccatgattttctaggccaaaatttatatttaagtgttcataacgtttctatgcatcatgcaatctcaatggatataaatttaaaatacgaagtcgatgaacctaatgaagaaaaattccatattagagacatagaaccattcgaacaagcttatttctacattggtagtttaggggaatttgacaatctacaaagtgttgaattatattttctaacagagtttcatgaaaaaataaaactattttatagatatgatacaaaaactaaagcttttaacaatattgaaaatttaaatgtatatgaaggagatacgaaaaaagaaagtagcgcctttaaagaattcaatccaagcgctccgacagaaacagttggattgaacctattagagacagataaagaaattattaatatataagtcagcctaacagctggcttatttttgtgcaatcaattaaggggtgaagatgatgaaacatagaatcaaacgcgggtttaattacttagatcagtcaccaatgttatatgcacacggcgtatgttactttacggcatcattgaggaagacaacaacttggtctgatcgaaacattattaagaatcattcagagcagtacagtccgcgagagtggcaaagattacgtagagttgcaatcaaaggtgcttcgattaattagcgatgttagatacatcaactcgtgaagcacgtactcacttctacaactcacaaccatggcgtgagcttcgtgctgctgcacttgaacgcgatcactatgaatgtctgtggtgcaaagcagctggccttgtgactggacagcaatcaacagtccttgaagtcgaccacattaaagagctggagttctatccagagtttgcgctcgacttagacaacctaagaaccttatgcaaggactgtcacaacaagcggcaccatcgctttaactatgcaagtcgtgggccaaagaaagaaaacaaatggaaggatgatgaacgatgggattaacaacggatgatgtgaagtacagaatcattagcgaccatgatgtgccagagatttatattaagggcgagaaggcatgggtcgttagttgttcaacacaatgggtaacaaccgatgataaaggaccaggcacaagagtcatggcagcaaccatctaccttgactcagagacaaagcgtaatcatatgcctataatgcacacaatttcagttgattcgacattacaaagaatattttttgaatagaacgacccccgggctaaataaatcgccttaaaaactcgaactgggaaccggtggtaggggtcgacttccacaaaaatcagtaaaaattcatgtgaaaggggggtggatgatgaatcaagccggtatgaaaagagaattgctcaaaaaagttaatcaaaaatcagaggtagatattgaaaaagttgaacgatattgtaacttagtcaaatatttttatcaattagataaatcaattaaagatgacgggctaatgataacagttaaaaatggtgcgcaaaagtttacgaaggctaatccggccattgctgaaaagaatcgtatcaacgcgcagctgattaatttaagcaaagacctaggattgtctgcccctcctccaggtgcgggtgataaaaataaagattatagtcctggtgatttaacatgattaagcaacaatatgtcaccgactacatcaagatctataaaacgggcaaaataaaattaaacaaagagcgagtcatgctgattaagtacttggaaaagtacgtgttatcagacgactcgctctattttaatgaaaaacagattaacgattgtatcaattacggtaataagtggtttttccccattcagccatttcaaaaattattaattgcgtttgtctttttgtatcacaagaataacgatcgtcgatactataaagaacatttatggctaatgggtcgtggtgctgggaaaaatggcctaatcgaagttattgctaattttttgatttcagaattaaacggcattcgaaattataacggttcaatcattgccaatagtgaagagcaagcgatgactagtgttgtaggaattcgagatgttattaatcgtaacagcacactgtcaagagcattccatgccactagtacgtttattcaatcaagagctaccaattcaatgctgaagtatcggacctcaaacgggaatactaaagatgggttgcgggatggtttcgtcatttttgatgaagtccatcaataccctgataaccggaacgtaaaggttcatatttctggtttaggtaaaaagccaaactcacgtgtcttctacattggttcagacggttatgtccgggaaggtttcttagacaataaaaaagcaattgcgatgaaagtcctaaatggcgaggttaaacctgatttgatgttcccgttcatttgcaagttagatgatgaatcacagcttgatgaccctgataattgggagcttcccaatccgatgttatccaagccactaactgggtatgccatcgatttatttgaagaaatcaaagaagattatgatgcattactcattgatccatccggccgtgaagagttcgtcaccaagcgaatgaacttgccacttgatgatttagagcgatcagttgcgccatatgagcaaatcaaagcgaccaacctgccactacctgatttggttggcaaagaatgtatcggttctgtcgattttgccagtgtacgagactttattggctgcgccttaacatttaaagacaaagatacctatccatcacttttccattcgtacgccatgaaaccgtttgtcgataagtattacgggtactcacgtaaagatgcccgcgacctgaagaaagttgttgcaccaattgctgaatgggttgatcgtggcgatttagaaatcatggatgacggtacggttgatattgaccggattgtgcaatggtttgttgatcaacgggatgagtatctaattaaaaaaatcgtgattgataattatttggcgatgacgctacgtaagaaattcgaagaagccggttttgaagtcgatgtcattaaacgaccaacgtcaattcatccactacttgcaccgatcgttgaacttggctttgagcacaaccagtttatctggggggatgtccccatcatgcgttggtacactcaaaatacgttggttaaaattgaccgccaaggcaataaaacgtatgagaaaaaggaagatatcagacgaaaaactgatggatttcaagcatttttatatacgttgtaccggattgatgagattgaggatatcgatatttcaggagcgttagataattttgcggaacttgatttttagactgaagggaggtgaatagatggcaagtttttgggattggattacgcggcgtgaagatgccagttatgtctatgatttggatatgttcgaagaaacatcgaaccgcgcctatttgaaacgtatggccttggatatttgttgtaattatgttgccaggaccgtgagtcagacagtatttaggcatatgaaaaatggtactaagcaaaaggatgactgggattattggctgaatgttaaaccaaacagcagtcaaaatgctgctttattctgggaagatttaacctataagctgattagaaataatgaagtcttagtagttcaatcggatgattaccagctactagtagcggacagttttacccgtaagcatcgcgctttgtacccagatacatttgaaggggtcactatcaacgactacacttatcagcgcaccttcagctacgatgatgtttggtatctaacttataataacaagaaactagataactatatcggcggactctatgaggactggggcaagatgctaggccgaatgattgaagtcaacctccgtaataatcagattcgcggtaagtttaaaatccatcaaacaaaaggtaatcaggatactgagaaacaacaaaaatttattgataaagtggtgaaatcttatttaactaaatcagttgcgtttgtacctgaaacaagtgggattgaagtcgaagaaactaacaccaccagcaagaatagtagtcaatcatttgatgagttactgaagctgctagactcattcgttgatcaagtggctaatatcatcgggattcccccagtgttaattcatggccaagttgcggacgtctctgatgcgcggattagttatgaaaagaactgtattggccccttacttaataaggttaagtctgaattagatgctaaggcgatcactgagtatgattacaagaattacgatgatcactttgtcttaatcggtgtgaatgcaccaaccattttgggcaacgctgataagattgataaggctgtttcaaatggtgcaatcaccccaaatgaagtccgaaatgaactttatctcgagccaattgaaggtggggatgaaatgattattactaaaaattatcaaaaattgaagggaggtgagaataatgacgacgacaatcaaaattaatggcccattggttcggggcgatgataaatgggtctatgacttttttggcatggaagcaacgtctgctccggatgttttagacaatctacctgcagataactcagatgttgaaattaacatcaattctggtggaggacttgtagatgttggtgctgaaatttatacagcattgcgtgcctacgctgggccagtgactgttaatgtgatggggatggcagcgagtgcggcctctattattgcaatggcgggtgatactgttaagatgagtccggttgcacgcattatgattcataatgcctccgcagaatctgctggtgattaccgggcaatggataagatgagcgatatgctcaaaaatgctaatgatgcattatccaacgcctacatgattaaaacgggcatggataaagatacgctgctcaacttgatgaatgaaacaacctatctgactgcggataaggccaaggaactcggattcattgatgaagtgatgtttgaaagttcggatgaaccaagtcttgtagcaagtgaaacaagctctcttttacctaagagtgtgattgataaagttcgcaatatgcaagatgttaaaaatacaacggttaaattatcagctccagatctaaaacccatgattcaaaaagcaatcgatgaattaaaagcaaccaccatcattgacggtaaaacgttgaatgaatgggatgaattgaataacaagcaaaaagaggaagtgcctaagacgagtcatatctatgggagcttcctcatttaattataggaggtcatattaatgacaatgaaagtaaaagacttggagaattaccaagcacgattaaaagatttcgcaacaattaacgctgatgcaactaaaactgaaggcgaaaaagcccaagcatttagtgatgcaatggcagccctcggcgatgacatgcaggccgaaattgctaagcaggtcgaagctaagactggcgatttattaaatgcacaaaaatctgatcctaagatgactaaagctgaacttgatttctttaatgaaatttcaactgatgtcgaatggaaagatgacaaagtcattccagaaacaattgttaccaaagtattcgaagacttaacgtctgaacacccattcttaaaattaattgggttaacatataccggtattaaattaaaggtaattcgtgctgatgccaaaggtgccgcagtatggggtaaattatttggtgatatcaagggtcaactagatgctgcatttacagaatcatctggtgatcaaagtaagttaactgtctttgttgtcctaccaaatgacatggcagaatttgggccagcttggactaagcaattcgtaacaacacaaattactgaagctattgctgttgctggtgaaacagcatttcttactggggacgggaaagataaacccattggcttgaatcgtcaagttcaaaaagatgtgaccgttactggtggtgtttatccagaaaaagtttcggccggtactttaactttgaaagatacaaataccgccaaaaaagaattagccggtatcgtcaaaaagttatctgttaaagaaaatggcaagccaattgtagctcgtggcaaaattgtattagtaaccgcacctggttcatcaatcgactttgaagctgcgatgaccatgcaaaatgtaaatggccaatgggttaatgctttgccatatggtttacaaacatgtgaatcagttgccgttgctgaaggtaaagtaattgcgttcgttatgggtcgatacgatgctttctcagctggaccactgacgattaaaccatttgatcaaacgttagctctcgaagatgcaacgctctacaccgctaaacaattcttctttggtaaagcagccgacaataatgctgctcaagtttatgatttgaaaactgatactgcaacaactgaccccggcgaagatggcggtgatggaaaagaaacgcaatacgctaacatcaacccagatgaagaagtaactggtgaatctgttgatcccagtactttaaaagtcgatgaaatcaaagccaaattaactgaagccggtatcgaattcgatccaaacgctaaaaaagctgatttattagcattattaccaaagacggaataaggtgattaaatgacagaccaggaatggattgaccgttttcggtccgactttaatttttcgcacaacagtgaagaccagcagttgatcaaatcgattcaaacttcaagagctgccatcaaacgaatgactggcgttgatgatgataccaatccggaatttgttgaattggtcattaatcgggtcaggtatgagtacaatgagcaactcgaattttttgaacaaaactttgaatcagcgctgatcggtttatcgtttgaatataatcaggagggagcaacaacggatgacaatccatcaattgaataaggattataaaatccccaaaacaacggccggtgacttaaatgtcccggtcattttttatcaattcgtacctcgtgacgggccagaacccggcgaggaaatgaaacgtgaactctatcgatgcaacgctgaagtttacgacccttcgatgaaggaccgtgagattttgcagtcacacgaaaccaagctggcagtcaccattaaaatccgagacacccgcgggcaatatctgccaaccaatcagcaccacgtcgagattaaagatagccgttatgccactaaggtctgggatgttatcgacacccgaccagattttaaagatgaccgctttatcatcatgattctggggtgtgcggaatgagtgttgagattaaagggatggacgaggtgctggccaaacttgatcagcaactgggcactcgcaaagttaatgcttactctaaagaggcgctcacaattatggggcgctatttagctgtccagattaaaaatgcggtcgccagttatcgaaacactggtgcaactgtgcaagaaattgtcgtctcaacaccacgcaaaaaagacggcacacttaccgttaaaatcggctgggatggcatggggagtcgacaacgttggcgcttagtccatttgaatgaatttggctatacccgtagcggtcgcacataccgcccacgtgggattggcaagattcaaaaggcctacgacagtaataaggttcaggctaaagagttgggccaaaatcagcttagaaagttggtgaattaatgccagaagtcaaagacatgctccgcatcgtttatgaccagctgctaaagaatcagacgattaagcaattaaccgctaatgatgacggcagtgattaccgtattaaattttatgattactcagaaacagctgatcacgatcggctgtttattttattgcagtatattgaaccaccacgcccagtaatcggtgggagtgatattgaactagcccaagaattcacgctgcaggttgatgtccaatcacctgaccgcgttgagttaaaactagcgcagtttgagattcgcaaggtaatgagcacgctagggtttgttcaactatcgggcggcttagacgagtacttcccagaaacaaaaagatatgtagatgcccgccgttatcgcggcacatcaaaactttacgatacagaatattaggaggaacacacatgacattagtaggatataaacgattaagagttcaaccatggagcaaagatgggaagcctttatgcccacaaatcgttgtacaaggtgataaggacaaaggtgctaccaagactgctgaaatttcaggactcgctaaggattcagtaaaagtatctggatcaaacattgcatattacacatcacgaaaaggtgttggcgatgtcaaaattgactttggtattttggatttcccagaaaaagaatctgatattgtcttaggatacaaggttgataatgatacagaaatttcatacatcggtaacgacacggaagcaccattctgttcggtaatgatggaatcagaaaacctacaaggcgaaattgcattgttatcagtatttagcggtacgttcaccaaagaaaaaatttctctgaagactgaagaagtagataaagcatttgaacctgaagaagaatcatattcattatcagctgtatctgatcaaaaggcaggaccacaaaatggtcaatacattggtaagtacttcggttcaaaaccagaatcaattaaggccctcatggaccaaacttttgggactgaatcaacgacaactgtgccagttgcaggcatcactttagaagttactccaaaggaagtgaaagtcggtgaaaccttcacaatcaaaacaactgtaacgccaagtaatgcgacggattcaacctacacgttggcatcttccgattcaaagattgcgacaatcacaccagttgcgggcaaagggacagcagttgcacctggtaaggtgacgattaccggtaccacaaccgatggcaacaaaacaggaaccgtagaagtaacagtggtagcagcagattaattctaatctgctttttattttgtaacagagacgagaaatgtgagacgaaaaattattaggaggaacatattatgtcagtacaaattcaattacgtggtaaagacggtaagcttcatacattcgaggagaaacacatcacagccggcaaacggttagaaatgatggatttagtaccagaacaatatccagatgcatcatcacgggaattctacgaaatcgaattagacttcattgccggactatttaaagacgaacgtgtatcacgcgaagcgattttagaaggtatcgattcttgggacttggataactttatgcaaggggtcatggcccaattgatgggttatgacccaaaagtgattctggagagcgagtctccagagacgaagtcaaacaacgaataattgcctacgtcaaaaaagttgttaatgcgtacggctttaatatcaatgacgtgctggagacagattgggatatcttaatcgcaatgacttcagctgatgaagcaactgatcagtcagcaccacagtcagctaatcaggaagttgttccattggaagacttcatcaaatctttatagaaaggaggaaattaaattatggcagaaccattaggccaaatgataatcgagcttggtttggacagttcatcgtttggcaaaggcttggccggtgtccgtaaagaaaccaaatatgctatgtcagaaatgaaatcaaacatggctgttttaggtcagacgggtaatgcgctagataaactgggcgccaagcaaactggtttaactaaagtgttagcagctcaaaagcgggaagttgctgagctaaagaaggcttatgaaggctcttttgttaatggaaaaccgactgctcaaaccgcgaagttagcaacgcaacttcaaaatgcaaatgctaaagttgctggtcttaattcgcagttgatcaacaacgcccgccaaatgacgattactgaaactagaacgcaaggttggactggtcatctcaataagatgtcggccgctgcggttaaaaatggtaagaccatgagctctatgggcgctgctgcctcgaagtatgtttcgattccacttggtgcggcaatgctcggttcagtcaaagcagctagtgattttgattcagcatttactggtgtcaaaaagacagtcgatgaagctaaggattctaatggtaagacgattatctcttataaggatttagaaaatggaatccggagcatggccaaatcaattccggtcagcaccactgaaatttcacacgttgctgaagcggctggtcaattaggaattaagaccaaaaatgtgttgtcatttacgaaaaccatggtcgccatgggcaaggcgactaatatgtcatctgaagacgcgtcggtagcacttgctaagttggcaaacatcacagggatgccacaaaagaattttgaccgattaggatcatctatcgttaaccttggtaataacatggccaccaccgaatcggatatcgttgaaatgtcacttcgcttggccggttccggtcatcaagtgggcatgactgaagcgcagattacagggttagccgccgccatgagttcggttgggattaacgctgaagccggtggcggttcaatgtcacgggttatgcaaaagattaatacttcagtcatgagtggcaataaatcgttaagtaagtttgctagcgtttcaggaatgtcatctaaggaattccagaaagcatggaaagatgatgcgtcacaagcaatcgttagcttcgttaagggactcggcaaggctaaggatagcggtaaagatgtcacatcaatgcttaaagcaatgggaatcagctccactcaagagcttgataccatgttgcgtttatcaggtgctggtgacacgctatccaaatcattgaagatttcaggcgatggttggaaagaaaacactgccttaacacaggaagctgaaaaacgctacgcaacgtttgaatcaaagctccaaattgttaagaataaactaaccgacgttgggattacggttggtgggccattgatgtccgccttcagtgatgcgattgatgcggctgaaccagcaattaatacggtggaacgtttagctaaagcattctcagatgcagaccctaaaacacaaagcatgattattaacatgggattattggcagttgccggtggtcccgtattaggcgttgtcggtaaattaacgtcaagcgttgggactttaggccggggctttgttgatttagtcggtaacattcgtggtggacaagccgctgctgaaatgacatcatcattgctcggaaaagtcggcgctgattcaatgacagccgcaggtggaatttctaagatgggacctgccacacttgaggcctcagagaatgctggcttattagcttttaaaatgggcgcagcaggcgaagcaagtactggtttagcagcggcaataggtccggttggcttagccattctcggaacgactgctgttgtcggtcttggcgttgccgcgtgggaactctggggcaagagcgcagttcaatcagctgagcgaactgcacgctggggcaccgacgttggtgcggctgctgaccagtcattgtctaaaatgcaaaacttttcatctgacgttcaaaatcaattagagggatttgcaagtaaatcacagtcttcaactaaggcagtagctgccaactttaatgggatgtttaagcaacttgataaggattctaaacagtcattcaagaagatgcagaaagatattgatgacttgcctgcctttgcgaaggccgctgctgaaaaagatttagccgagaagaaggcaactaatgcaaaggttgtcgcggacgctaaggctcaaaacaaaaccgttcaaactttattgaagcaacataacggcgacgtctctaaattatccgccgatgaaaaacagattgttttaaacgccagaactagaatcaccgccgatgaattgaagctacttcaaatcggtggcaaagctaaaaaggttgttcttgagactttaaatggtgatgtctctaaattatcacgccaacatcgtgagcaagatattcaggacttgtctgaacaatataccaaagagaaaaaaatctacgagaatcaatcttcctcaattaaaaaggcttataaggatggcgctatttctgccgatacctataaaaagtcgatgaaggaacttgaatcaagtcataaaagttcggtcgacaacatggccgctgcgactctgaagcttgatcgtgcgaatggcaaatctaaagatgaaatcatgcaggatttaggggtttatgagacatcgtataaacgtgccgctgaaatcgtcgacggtcaaactaagaagatgtctaagagcacctctttaattgcagctgatactaattcgatgtctaaggctactgctaaggcgaatgagcaatggaacagcctgatttttgaccctaaaacagggaaggttaaaaccaacgctcaagaggaagttaataaagcagcacaatctaaagaaggttgggccggcttaaaatatgatcttaaacacgctaacttatctagcaacgccaaactcatgattggcgaagcagcgcttgccaatggtaagtgggatgatttaacttggaaagagcaacaagccattgttgccgttaaaggtaataaagagatggctgacatcattcaacaatttggtatttggaatcaattcacaccccaacaaaaaaatgcgattttgcatggtgatgctagtccaattgctaacttgctcttaaaaggcggacagtggaatatgctatcgcttaaagaacaacaggcattagttaaggacaaagcaaccgtaccactggtaaatatcctagataaatatggtgtttggcaaggcttgtcggatacacaaaaaaatgcaattttaacgactaaaggtgcacctgccttagcggatttagttattaagtatggcgcttggaacgacttaccccaaaagcaaaagaatttattagttaacaatgctgatgcacgtcaaaagttaattgatgcaggtgtgttggtcgataagtataaaatcaacaatccaccaagcaaagctttaaaagctcatgacggtggtttagccggggcagtcattgccggcaacaatcaaattaatagtgttaagcgcaacaatccaccaagtaaagccttgaagggacatgacgccggtttaggtggtgcggtctcacacggcaacaatcaattgaatggatttaaagggaataacccatcaagtaaggggttaaaagcccatgattcgggattagggggcgctgttacaaccgctaatgataaggttaatagttttaagcgaaataatcctaaacttaaaaatctgaaagctaaggataatgcttccggaccagcaagctcagcatcaaattcggttgatattttcagtcgcaaaagagatcacacggtcacattgacttctatctttaagaccattaccaagaagattactggtaagagaatgggtaccgattatcacaccggtggtccgatgatggttaatgatcaagcgggccccactttccgtgagttaatccaacggcccaatgggtttagttttatccccgaaggtcgcaacgtcattttaccggacgaaccaattgggacgaaggtgattaccgcttcacgaactaatcgtttattaggtgggattccgaagttcgccaatgggactgctgggattcccgctgatgcgcagattcttaagaacattgatcaggcacaatcagcattaactaatcagacgattaatattagtggtggcaacaatgatgaggtagtccgtaatcaagaagttcagattaaaatccaacaatcgcagttggatattatgcatacattgctcaatgtcttgactagccaggaaccaaataatagcggtcttgatttgaaacaattagctcagatgattaacgaaaccaatgcgcaaagcaaaaatatgttgcgttataacaatggataggagagatgtcattggacttttcaaaacctagattatttgccaaagttgatggccacgatttcgattttgatgaaatgaacggtcttcattttttagaattgagaaccaccgcgccacagactagaaccagtttacaaacgaatgattttcaagacggtagcagacagcaaggccccattctttttggggcccggactgttgctgccgacttttattttgaagctactgatctttatgatttcgagttggccagtcaagagatttggcgccggctttattcacgcaatctgattgaattgagatggtcgcatatgccagggattaaaatgctggtaattgccaaaccatttgaaaccacacgacttaattggggcgacatgaagttcactgttgaattcgatatgcctgcaggttaccgccaatctttagctaagtctgatcagatgcaatttatctacgaagatgagttggctcaaattgggatgaatttaccgaatggggaagatctcgcatatcgttttaagcagactcgttttaaagtttataatccgtccgacgttgtgattgatccatattatcagcatcacgatttgggcatcattatcaaaggttcagggacaccaacgattaccaatcacactaataattatgggattgcgttaaatcgggcgctcacggcgaacgacacgctcatttggcatggggttcgcccactactgaacggggcgagctgtgaacgtgtctctaatcacggccatttgcaactggaaaaaggctggaatgatattagcatagctggtttgtctaatatcgatatcaccttcagctttccattcctgtatctatgattgattttaagcagcaaaagattctcgtccaagatgccgccaaccagtattctgaaacactagtcgattttgaccgggcttcagttaagcgcacttggaaaaagaatcagtcctatcagttagaactaaccgccacaaatgatgactcattggcgtatagcttattgcgtaacgagaactcgctattggtcggtggtcaagaatatatcatcaaacaagtgaagccggatttgaaaggttacagtaatcaagtcgcgattactgcgaaccatgtttattacgaatcaaaacgtatctggcaatacgacaagcgtgccggtactatcacctacagcattcaagatatcctccactactttttcgacaacaatccttacggtttcacttgggaaattatcggtaattttagcaaggctcagattgaaaatttaggtaacactagcgcactggacgcgctcaacacttgcgtggacaagttcaattgcgtgatttatcccgataataagcacatccggatttacgcccgcgaagcttggcaaaaaaaggtcgataagtcttatctctatggctataacacgacgaccttcagctgcagctgggatacgacgtcgattcaaaatgtcaccaaatgttatggcaagcaaaaggatggccaagagggacagtattacttcccgccatttattgccaagaattcgaccagtattagtcgttggggtgagagaccaggtgccgagatttcggatgaacgctttacggacaagaacgcgatgaacacctacgcattgacaacgatgcaagctgacccagtcacgacaatgacgctcacttatgatggtggggacgaccaagttttacctggcgaggtttggtatttacgtgtagaacctgaacagttcgacaccgacgtcgaagtcacgggcatcaccgattatccattcgcccctgatcataaaccagaagtcgaattggataactcagtccgcacacttttagatgaggatatcgctcaggagcggctagtcaaggaagcaattaagcataatcagttggcagcacaagagattaaagccactaacgaaaaggcagtgaaggcctacgactcgcgcttcatcggcgacctgtatggcacgccaaccagattaacgcgcgccaccggcccacagttgccgggctatatcctaaaagttccagcagataatcccgacttaggattaaaaaaggaccaacaattctatgctgctacggcggttaattatgtggaaggcctggcagaatatgtaacgggaatgctaccggtaataccagaaataccgaagtacgaaccggcaacaccaacgtcagacgggctgatgagcgcgactgataaggttaaattagaccaactaaaaatagaaccggtacccgaactgttaatgacagataaggtggacggttctatttacgtaatcaccgtggaaaaaggtgagattaaattaactaaaggggagactaaagaatgagtttaataacggatgatttttctcctgccttagacagaacgtttagattacaattaattgaaaattttaaagaaattaaaacttttattgataactacaaagaggacgattcgcctaaagacgttttaacaagtgaagatttaaatagattaagcgccgatttagacgaaaaaattaatcgattaatcctcggaattgatgaaaatacggttcgtatcgtagtcgaaaaaatcttacaagagaaaggaattatttaaaatgcagacaatgaattttaatgttggctctgatcgacgtggactggtggccgacgtgcaaaatttcaagattggtaatgacgctaaaaattgggttcaggcccgtcagtttgaaggcgagatgcgtacagtagtagttaatgtcatggaaggaacaatcccacttaatttaacgggtacgacgatttggtttgagggattaatgtcggatggaaaaacaaggatcattgatgctaaacatggtacaattctaagcccatcaactggtcaatttagatttgaattcccgtacgctgcgttcgcaacgtttggaagctacaaacaatcattttttaaaattgtccgcgatggcaagtcgattgcgacgcttgaatttacgttagacgtcttagtcaatctggttgaagatgggattgtgccactcgattacatcacaccatttcaagatttatatgctaagttagacgacatttatcaaaatgctgataatgatattcaagtaatggtgactaagtggcaacaacaaatcactgagttgatcactggcctaaacagtgattatgcggcaattcaagcgactgttaatggattaaatgagaagttagattcgattcaaaagcagattaaagatggcggattattaacacaggctgattttagtccactgcaaaatgaagttgagcaggcacgcggtaattcagcaaaccttgctgaacgaatggacggatttgttagtcaatccgatctagaaatcggggatgacaattataatgatgttgatggtggcatccggaattattttgttgaaccgttaaataagattaagtcaggtattaagactggtgattctaacgtatttaatcttggatttgggacagattatcattacgattcagcttccgattttcaactctacgacaatagcccggaagccaaggcaaaagctgttgaacaaatgaaccaaggattgcgcaagtcattaaatattttgagcttgtccgacaaactagatgcacttgtgtttaatggcgacaacgctgatcaacctacagagtttgatttaccacgacaacgtgtcctgatgtacaagcaagaacaggattttgcgaatacggctttttcaattgctaagtgcccagtattcttactcaaaggcaaccacgacaataactataatatgaaacacaatgatatgaatttaaccaatgttctccatgacgctgactttaaaaagttataccggcaagatggtagtcaaggtgaagttcgaaaaggaaacaataattatttttatcgtgattttccggaaaagaatattcgtttaatcgggttagatacgtctgattcacccgaggcgaccgacggcgagggtgttttaatttatgatcgattccacaattcatatttacaacagacgcaacttgactggttggcgaatgttgcgcttcaaaacgtaggggatatgacggttgttatcaccctccatttttcggttaacaggacagtcgcgaatcgagatgatggtaccatgattaatcatgatttactaagaacaatcctagctgatttcgtggccggcaacgtcacgaataaaacaatcacatcaactggcgcaattccggccgtggtcacttactcattccaaacgagcgggaagattgctggtgtgcttggtggtcattatcatacagacaattacaagaaagtcgacggtattaattatttattgacacgctgctccttgattatgggtgacaatgtccttaaagctaaacggctggattatgacgggacagcactcgaagatgcttttgatgttgtaacaatcgacaccactaatcggacgatttcaaccgttagatttggtgctggttcggaagattcaaaatatgccacacgtagctatgcatattagaagggagcatgtaaatggaaatcacagaatcaattaaacgattatatcggttagtgacgcatcacatcggttcaggtggtgacgcgcatgccattgttaatacaatccaacctgggtttatgacgcccaaacaaaaagctgatttaatcgaggctaagggactacggacgtgggttgcgaccccagaagatggaagtcggattgacgtcttatcaatggatgttggacattattatggcatatatacggcctttacaaataccccatcgccgtcgcaagagacaccagaaaatgcggcgtttgttgagattgatgttttggcggatagtaacgaaccgcaaactagaaaacaaatccggtttagggtctcgagcaacggcattgtctgggagattaatacgcactactcgcttgccgttggtggtaatgctgatggctacccaaaactttggcaacgcatttctaaacattccgatctatggagtggtaatgtttcagcagcaggggcggttatgacgcttgcagacaaattggttaactatcaatatattaatatcagctacaatgtgcttgcttactcatcaactaagcggtttgatataacgcctaatatgactctgagagatttaaacattcctaatagtgaaacggataaatcgtttagcgtttttgaagcaattttgacatacgatccatcaagaccgagtgaactaaagttaactagtacgaccggtcgacacgctggtggtagttcagttacgattgatgatacgactcaaatcacaattaccaagattgaaggtgttaaataatgaagttggttattaatgataagcaagagattattagttatgtctctattggtgatatgactggctcaattgaatttaaaggtgcagttccagccgggtttgaagataattttcaaccggccttttatttgcttcgaaataatgaaatcacagtgaatccggattatgtatcaccaaagccaccagttgttgggccgggcaatcttgataaagctattgctcaattaacgttgcaaacagctcaacagaaggcccaacaagataaacttaatgcgcaagtgctgctagagattgcacaacttaaaggaggtaataattaatgtttgattttatcaaagagtattacgagatgggtctttatactaaggatgatttggtaactttcaaaatttcagggatgattacgccggaacaatatgatcagttaatcggtggccaagatgaatctgtttagaggtttaaaatacgcgttgccagtagcaatcctattatggattgctattttcgttatcttcaaattattattttaggaagtgtcagaatgaatagtttaaaaggattagggcagctccttatgtggttattaaccataccatctgcttattggggggccaagaccgctacaacagagctggttaagcatcgtaatatgcgtttagcaagtcttgaaaatcgcatgaacgccaatgataatgcggtacaagccgtacttcatgattcactttacaagcagtgtactaaagtcatctatcggggcgcagtgactattagcgagctagataacattgagcatttatttcgtgggtatagcggtgttggcggtaatggaaccggcgaagcactctataataaggttaaaaatttaaaattaattgatgataaggagctgattgagcattgaattggcaagtgagatttaaaaacccacatttttggtttcagattttaatagcagtagcgatgccagtcggtgcgtattttgggattaaagcccaagacgttactagctggcatattttatggacaacatttggtaaggcaatcgccaatccttatgtgctattaacagtagcagttagcgtttataacgcgatcatcaatccaacaactaaaggagtaagagattatgaaaaaattaaataaattagtagtcgccacaatggcgacttttttaatgcttccaattggtagtgttgccgcggctcggacagatatggttgatgtgtctaatcacaatggttatatgtatgtatctgattggactgggatgcgggataagtatggcgttaagtcaatggttactaaaatcagtgaaggaaccttctataaagattacaccgctgctaataacattgcgaccgctaaacaagcaggtatttatcaaaatggttatcacttcgctagatataagacggcagctcaagcggaagcggaaggcagctacgcagcatctttggcaaaacaagtagggttacctaataatgcggtattagtaaccgatgttgaagcgactgagcaacaatacacgccacttactaccaacgattacaataattttatttttatgagcaccgttcaaaaatacggttatcgtactgacatctatacatccggttcatggatgaataacatcatgacagttaaaccaggtactggttggattgcaagttatccttatgtggttggcgacaaacaatggtatacaggcaatcacgcatggcaattcagcagcacacaaaattttgccggaaccactgcggtcggtaattttgacgtgagtcagttaaatgatgaattctataccggcggtcaaaacactaaaccagtcaatccagtgacgccgccagatacaagcacagtcgccaatcaagattacgctcaaatcggcacatttaaagcatttacaacagtcaatgtccgttccggtatcggcaacaactcgccggtcgtcgcaacctacgcgcctggtgagtcattgaattataaccacatctacatcattgacggtgtagtcaaagggcgttatacaagttattcaggccaacaacgttacgcgtcgatgggttatatccctggtgaaaatttcggtacgcgcaccgctataactgtcagccgtcattacaaagtccactacggtgattcgttttggtttattgccaataaactaggagttaatatgtacactttagcagctaataacggtaagagtattaattcaatgatctatccgggtcaaacattaacatattaaaaaaagccctcgtatgagggcatacatattaattagtgaacctgttaatcaaaaatggtacaagttttagttttgctttaattcggtatctatcgtttacttggtatttaccattaaaagccatagaaactgttgacttaccagtatcagtttcaagtttaagttgatattcaggtatggcatctgtttcgaagtaagtaattttaaaagatgtcccaggttcaatagtcatcggttttatagatttaactggcttataacttccagtaggaataggtgagggattatatttctcaatcgttagtttcacaggtgtcgtttctggcgatatgtacagaactttatttgcatcttctgtcccatttagggtaatatcatcagaaatattattatacaagggagccgcattgattggatagtgatttatgcttatatcttcatagtaggtgtagtttttaaaaaatgaaatccatagtattaaaaagaataggatcactttaacgataaaagataagaaatctagcgggtctttattatttaagtaccaacgatatggattcatttaatcactccgtacatagtttattattctattatatcgtaatagttctctataaaaatactagaattgccgatattcaactttaatatcgttatcaagtagtttgcgcagtacagatttgtactcctccagctgctcaaaggcaaccactcccagcccatggttgtaagtagcaccgtcgaactcctcaagatagaagttataggtgtcattaaatcggtccttaacaaccagcaacgagtacgagtgtctaggtttattcttatataaatggttgaatgcttctattatgcattttccgttatccgtcatctgatcacctcgcaattattatacaataatcgtttgacaaatgcgaatgtatgttcgtataatggtagtcaaaggagtggtcgagatggagtatatcagtttaaaaggcacgattaacagcactattaaagttgtcaactttacaccgtatctagtgagatttgaactcaaaacgccggaacaaagctataactgcctggttgcgctagatacatttaacttcatgtatctagcgcaagagggtgcgccaatctcaatctttggccactttaataaacgacaccaattaatagtagataagtaccatgtcaagaatggtattgaaattttatctgctgtaagatgatattagaacataagtcgggagcgaattgaatgaagcagtttgaaccagcacggattaacgatcagtattctttagttttgaacccaaccggaaatgtcgacctatatgaggaaggaatcggcgtagtgggtagcatgagttactactatacgcgaaatgatttgcccttattcatttgtcgacacgatccaacggccgatttaagaaccattcatgacgtgatggtccaactggataacctgatggacgaaatggtcgaatgtggttgcttaatggtgggtggccggaatgttgcaattcagagataaataaaaatgccatcctaagttagggtggcatttttgatttcttctataatataaattgatttatagttgggcgcagaacgaaccggatagctacttaaagacaaaataaaaacccgtcaacttaatgacgagttttatactttttctgcaccaatctgcacggaggacttacaaatcccagtgcaaaaggtatatctatgcgccacccgggagtcgaacccggatctcaagaaccggaatcttgggtgctatccattacactagcggcgcaacctaacatgtgtactcaacagtacaatatattattttagcggatatctaaaaaaaattcaagtcccaattttaataaatcgcgataaatcaacgttttaaaattattcggaaagaaaacgtattcattaagcgtaaagcattgcatgtattttactcacttgatataatggtcttgttcaaaggataagttactagttttagtaagttgccttttattttttgccagacatgggtcgattgatgacacagatggacattttatgtcccaccggaaagtaggcgagagcaatgcgcgatgagttatctgcaatagaagcggttgcgcctgattttgtcggtgtcgttaagaaacgttaccaagtcctacaacatattgattggcttgcaccggttggtcggcgcacactcgctgagcaactcaaattgagtgaaagagtcattcggacggagacggattttttaaaggcacaaggtttgctaaattcgtcaaaatcaggtatggttttaactgtcaaaggacaagaagttcttgatcagctaagacaagtaatggaccagttcttaggattacggcagactgaacgagagttgagtcgctaccttggaattgagcattgcttaattgtttctggcaatagtgatgaacaaccaaaagtcctcaccgaaatgggcaaattagtcaacagtacgttacagttattactaccacaaggacaaagtgttgtggcggtaatgggtggcacgacgatggctaaggcagctcatgaactgtcaactgatctttctaaaaagcgcaatttaatctttgtgccggctagaggtgggattggtgagagtgttgatattcaggcgaatgcggtttgtgccgagatggccaaccaaactggtggtaagcaccgggcattatatgtccctgaacaggtgagtgagaaaacgtatgccccattattagaagaaccaagtgttcaagaagtattaaaactgattgaacgcagtcgtggcgtgttgcatagtattggcgaagccattacgatggccgaacgtcgtgacatgccggttgaaaccatcaagatgctgaaagaaaagcacgcggtgggtgaagcctttggttacttctttaacgctcaaggcgaagtggtgtacaagattccgcgaattggattacagattcgtgacttattaaatattccgtgtgtactcgcggttgcaggtgggacttctaaggcccaagcaattgaagcgtacatgcacctcgcacctcaacagacgtggttaatcacggatgaaggtgccgcaaactcgattttacaaggggcaaccctttaaaataaaaattttcatttcctaaaggaggaaattctattatgactacaaaagtagggattaatggtttcggacgtattggtcgtttagctttacgtcgtatttacgcaacaagcagtgacgttttggaagttgttgctatcaatgatttaacatcaccagacatgttagcacacttattaaagtatgatacagctcatggtcaattcgatcacgaagtatcagctacagaaaacagcatcgttatcgatggcaagaacattccagtttatgctgaatcagatgcacgtaatattccttgggttaagaatgatggcgttgacttagtacttgaaagtactggtttctacacatcagaagaaaaatcacaagctcatcttgatgctggtgctaaaaaagttcttatctcagctcctgctggcgctgttaagacagttgtttacggcgttaatgatgacactatcacagctgacgacaacatcatctcagctgcttcatgtacaacaaactgtttagcacctttagctaaagcagttaacgatgctttcacaatcaaagctggtacaatgacaactgttcatgcttacacagctacacaaaaattacaagatggtcctgatcgtggtggaaacgtacgtgctgcacgtgctgctgctgctaacatcatccctcattcaactggtgctgctaaagctcttggcttagttgttcctgaattaaagggtaaacttgacggacatgcacaacgtgttccagttatcactggttcattaacagaattagttgcaactcttgacaaagaagttacagctgacgaagttaacgctgctgttaagaaagttacagaaggcaaccaatcattcggttacaacgctgacgaaatcgtttcatcagatatcatcggtacagaatttggttcagtatttgatcctactcaaacacaagttgttggtagtggtgaaggccaagttgttaaagttgttgcttggtatgacaacgaatcaggctttacagctcaaatgatccgtacattagaaaaatttgctagcttaatctaatttcacttttgtgaacttagaaatgcgatagcattttataaggcgggaggaggtaaactccttccgtctttttttatgaaaatctaggaggtttgtccacatggcaaaacaaacagttgcagatttaaaagatattaaaggcaaaaaagtcttagtacgtgttgactttaatgtaccaatcaaaggcggcgttatcggtgacgataaccgtatcgtagctgctttaccaacaatccaatacatcatcgacaatggtggcaaggctatcttactttctcacttgggccgtatcaagagtgacgaagacaagaaagaattgacattgaaaccagttgctgcacgtcttggcgaattattaaacaaagacgttactttcgttgcttcaaacgaaggtcaagaattagaaactgctatcgatgctatgactgatggtcaagtattagtgatggaaaacactcgtttccaagatatcgacaacgactttggcaaacgcgaaagtaaaaacgatcctaagttgggcgaatactgggcatcattaggcgacatgttcgtcaacgacgctttcggtacagctcaccgtgctcacgcatcaaacgttgggattgcaacagctatgaaagctaataacaaacctgcagttgctggttacttattagaaaaagaaatcaaattcttgggcgaagcagttgacgcaccagaacgtccatttgttgctatcttaggtggcgcaaaggtttctgacaagatcggtgttatcgaacatttattagctaaagctgacaaagttattgttggtggtggtatgacttatactttctacgctgctaaaggtttatcaattggtaactcattagttgaagaagataagatcgaattagctaaagaattaatcgaaaaagctggcgacaaattagtattgcctgttgataacgttgttgcagacgcattctcaaacgatgctaagacagaaactgttgaaggtaacattcctgatggctacatggcattagatatcggacctaaagcaatcgctgacttcgaaaatgttcttaaagatgctaagactgttgtttggaacggccctatgggtgtgttcgaaatggacaactttgctaaaggtacattggcaattggcgaattcttaggtaacttatcaggtgctacaacaatcgtcggtggtggcgattcaacagccgcagttaagaaattaggcgttggcgacaagttaacacatatttctactggtggtggcgcatcacttgaatacctagaaggtaagacattacctggtatcgctgctatttcagacaaataattttaaattaagaggagattttctcatgcgtaaaccaatcattgctggtaactggaaaatgaacatgaacccaactcaaacaactgagttcgttaatgctatcaaagccaacttacctaagtttgatcaaacagaatcagttatcggtgcacctgctgttgacttacctgctttattagaagcagctaaaggcacagacttaaaagttgctgctgaaaactgttacttcgaagaagctggtgcattcactggcgaaacttcaccaaaaactttgaatgaaatgggtgttgattacgtcatcatcggtcattcagaacgtcgtgattacttccacgaaactgatgaagatatcaacaaaaaagcacacgcaatcttcaaaaacaacatgacacctatcttctgttgtggtgaatcattagaaactcgtgaagctggcaaagctgaagaatgggtttcaaaccaagtaacagaaggtcttaaaggcctttcagctgaccaagttagctcaatggttattgcttacgaaccaatctgggcaatcggtactggtaaaactgcttctgctgaccaagcacaagaaatctgtgctgttgttcgtcaaacagttgctaagttatacgaccaaacagttgctgacaaagttcgtatccaatacggtggttcagttaaacctgcaaacgttaaagaaatcatgggcaaagaagacatcgatggtggtttagttggtggcgcaagcatggaacctgcttcattcttagatcttgttcactttaacgactaatttttcgctcgtatgtatttacgaatcactaaaaattagctaaaataagatgtgggctttgcctgacatccaaaaaagtgctggtgaatatcatcagccaaaaaaggagaaaattacatgtcaattattactgatattttaggccgcgaagtcttagactcacgtggtaatcctactgtcgaagttgaagtttatactgaagatggcggctttggtcgcgcaatcgttccttcaggtgcttcaactggtgaacatgaagctgttgaattacgtgacggcgacaaatcacgttttggtggcaagggtgtattaaaggctgttgaaaacgtaaatggccctcttgctaaagaaatcgtaggtttcgacacaactgaccaacgcggtatcgatgctgcaatgatcaagttagacggtactgaaaacaaaggtaaattaggcgctaacgcaatattaggcgtttcattggctgctgcacgtgctgctgctgacgaattaggcttaccattgtacgaatacttaggcggccctaacgctcacgtattaccaacaccaatgatgaacgttatcaatggtggtgctcactcagataacaaagttgatttccaagaattcatgatcatgcctgttggtgctaaatctgtacgcgaagctatccgtatgggttcagaaactttccaagcattgaagagtcttttatcagctgacggtaaagttacttctgttggtgatgaaggtggtttcgcacctgacttcgcaaacaacgaagaacctttacaatacttgatcaaagctatcgaaaaagctggttacaaagctggcgaagatatctcaatcgctatcgatgttgcttcatcagaattatggaacaacgaagataagacatacaaattacgttggtcaactggtgaagaattcacaacacctgaattcgttaaataccttgaaggcttagttgctaaatacccaatcatttcaatcgaagatcctatcgatgaaaacaactgggaagactgggcatcaatcactaaagaacttggcgaaaaagttcaacttgttggtgatgacttcttcgtaacaaacactgattacctacgtaaaggtatcaagatgggcgctgctaactcaattcttgttaaagttaaccaaatcggtacattaacagaatcattagaagcaatcgaaatggctaaagaagctggctacacagctgttgtttcacatcgttcaggtgaaactgaagatacaacaatcgctgacttagttgttgctacaaacgctggccaaatcaagacaggttcaatgagccgtactgatcgtttagctaagtacaaccaattaatgcgtattgaagaacaattaggtgatacagcttcatacaaaggtatcaactcattctacaatatcaaaaaataattaaatttatttcaaaaggctcaccattatggtgggcctttttttgtgatatatttttaagatagttaaatgtgggagggggatattgtatgaaaaatataaacgaaatttctcttaagatacttatggaagaaacaaatagttcatattggattatatatcagataatgaaggaaaaaacaaaagatgaagctcaacttaacatagcattgatgccattcttatcgtcagtctgtgatggatggatcatggtattcaaattgcagaattcggatatggcgttaccagagattaataatcttccatttgagaaatatgtgcggtcaatccgagttagctataagttgtattctgataagaaagtaaataagattaataaaactgttcataagtcaggtttagagagacttcggttgttagtaacagagtataatattattcaaagaatccgtattattctttggggacagcctgatttaggtgtgtatagttttaaagggaccccttacggaaatacgagtcaacttagtatttatttagataaactggtagatatagaatctactagctcgttatcagaatatcatgacagtttaggctcagtactaatggattattcttcaatacttagtacatttatcaatagcatcgttaatgatacgtttaaggataaggttggtttagaaaaagttggaaagttttcttcagttgaattccaacacaaagattatttttatcatgataaaaaaagaaaaaatatactaggtggcgctttaccaaaagatactcagttatttttgttcgatatatattgccaaaacaattttatcaataatgttatgccgttattcttgaaagaatctgagtcgttattctatagatctaaattacaaacctatctaacgagtattaatagtctgatattaattcaaaaaaagtataaaacacttattaataatgaacaggctagttctattgagaaacttattaacgaaaagaaagagtattttactttagaaaataaattacgaaacaatgtttttcattattgtattgaaggaatccctgtttcagtattcaaaaatccaaactgttattttaaggaattagttgagtattctgtgggaattgagtttaaagaatttatgagacgaatagataattcgttggatgaaatcaatcgaatattctgtaagataattatgtggaacgacaagcaatgaatacacttgtttgtcaaaatctcaagaggacttctttaatatagtttgtaaccgttttaaactcattccataatagagtcattaagcataagtgaggggtaatttaatgcatattgaacatgtcggtttatgggttcacgatttagaagcaatgaaggctttttatcaaacgatgtttcaagcgactgcgggtgagttgtatgagaaccacaaaaaagggttccaatcatactttttaactttcgcagatggtgcgcgtttagaaattatgcaccaagatagtgaactagtcggcttagcaactaggggccaatttgcgcacttagcgatggctgttggtagtgaaactgcagttgaccaattagtgactaagtttcaagcacaaggcttaccattgctaaatggcccacgagtaacaggtgatggttattacgaggcagtcgttcaagatccagaacagaatttaattgaattaacggtttaaaccgacaaaaaaagagttactttaagcgtaactctttttttgtttggttaagattttaagcgatcaatttcgtctttgagcgcctgattttctttttgtttctttcggtaacgccagtagacgtaagccagaatcagtagaataagtgttaaacctgccaagatgtaaggccagtagtctgtttcaggcgttaagctgacgtctttttggttccacttagccgctgcttggcggctgattgtaaagtgacgtgtgaagtgccaggtacgaccttctgaacggactgttaaatcaagcgtgtaccggcctggtttaaaccgatcattaagcggtagatagaactgcataaccgagtttggtgcaaattggacttgctttttctcagtttgataaagcttcgtcttttggttacgcttggtgacaaaggcgtttaatgaggtttgattctggaatttaggttgcacattgcgaatattggcaatgatttggttggtccccatatgttgaccagttttgacagcaccgagtttgaattcaggtgtgacactttggtcattgctgcgggcaactactgcaactgcatacgcaaacttattacgcacgctaatctgctgtgttgtttttgctgttgttgggacttcagtcgcgctaatcccaccaactaattggcctttaaaagctttatcaggtgcgcttaagcgaatattgacgactttttgttcatgagcggttaacgtaatgttctttttggccggttttaaatgtttgcccaacggatatttgagtgttttatccgattgattcacgttatcgctataattgacgacgccgttaacattggtagtcgccgtgttagtttgcacacgaaccttaattggtttgtccttatgattaactaatttaatctggagatcttgttgttgcttgggttggacaactaaatcaaaataacttaattgtttgtcggcctgattgtcaggcggaataattgtcatcgcaaaatctgctacgggttgcgcggcttgagtggcttgcgcgtgggcgaagagggcaattaggccaaataataggccgataactagtcttttaattgttgtccgcatattcaaaaactcctttgttagctatttgggctagcgattaaagtccatgtgatatctgattggtaatgtgctttgtcagttggattaacagtttttggtacgtggaggaagatagcatcactatctgttcctgatgttggtgccgtgcctagggttgctgcaacgctcccgaaggatgtcgcgccacctttcataaaggtacttgcttggtcgttaacttgaaccgtttgatcgctagtcgttggtaaggcagcatcgcccttgttagcaccatcaattgtgacgtttggtgttttaaaccaaatgttaacgccagttaagacatcggaagcatctgcgtcacttgcgtcagtagtgccagcgttagcgaaatctgtttgggccacttgtaggtcccaaccgtctaatttagcttggctacgatcatcttgaattgaaacaacattactagtggcaagcgtgtttgctgtgccaatgtgagagccactttccaccgctgctaaatctttgtcagccgaacgatcgatttcatgggagccaaaatgaaagtctggaacagcggtaatcactaatggattacttttttcagtgaagacaaccgctgcatcagtcgtttgtttttcaacttccgtaggagctgcttggatttggcctgctgacagaagagttgttgttgcgagtagtgagaataaagttgtgctaatcattgtttttttcatagtaggtcgcctctttcttaatgagtagaatagtggttaataataggagcaatccgctaagttgataatagcgtatatcggtaatactggtttgtggtaaccgttgtgttaatggtggtgcatattcgagtggtgtcatgtgccattcgttgtgaatggtgcccgcattgtcgggtgcggcaatcaaaggtggtcgtggtagggggacgaccggtagcgtttgctgattgctaaattgaattgtcgcactcgaactagcgggcacagcctctgctcgaatcggtgtgaataatagactaccacctaacagaaaagtgaaaaaatagcgtttatacatcgcctctaacctcctaacgatttaattgggggcagtgatgagcattaattctaattcagccgtatacggggttgtggtttgtttaggaccagctggaaattgggtttgaacagtttcgtggagtaaatccgtcaaatccgtttcatctgcgccgggttgaatcggtgcatgagcggcctttgaatagagttgttgcggttgtccggcaaccaatggtttagtagtctgatccttacgccaaactagggcattatcgagtgtggcttgaccagcggtaaaaggttgcttgagattgacttgaatagcccagtctccccgggtggtggcgcgtggatcagagacaatcagactggtatctgctgtcttagtataggggtagagaggactttgactattggtaagcgggagactgccaaaatcgaggtgagtcggtgctgctagaaagcctagcttaccagcaggaatatcctttagaacctttcggacaggcgttgtgagcgcgtatggtgctgggtagttagcttcaacaacaatctgattgggttgcgttggtaaatcagattcaaattgatagtcgaaagcctggttggcagccgctgctttagcagggccttttaataatgattgtcccgcggcgcttagaaagttcagcgtgagctcactggcaggagtcgcggtcccatttaaagcaaatttaaatttctgggcatcatcggtagggagtccaccagtgttgataagggtgatgatttcaggtggtagtggatcgtgcaaatgaagttgcgcaatattttgagtagaagtgagactttcaaatttcgttttgaaagtcgtgtcagaactgttcgttgtgttagtggtgccaatggtgctatcaaagtgaacgaatggataaatcgttttggtttgatccttttcagttaaactgacgccacgataaatggtgtgtggggattgaccagttgtgttttcaaggttaagtttaatgttttcaaatagtcgggttgcggcaaccgtattgttgttgatagtgacatcagaatcaccaattgtaaccggactgttgctaccactgaggccaaataagacagattggttagtggttgtttgattattaatagcgacttgactgttatcgccaattttcatgtaagaaccagcactcgctagtggaatgagcccgttggcaatactttgcgcaccgttgatggtgaggtcaataatactgttgtcacggaagtcatgcataagcggtcgcgcacctgaaacagctaaatattgaccaaaagtggctgatagttgactaccaatatccaatttaagaccattagcttggatgttacggataaacgcatctttggcggttaaggtcatcttagaagtggtgtcggttgtcatttgcatgattggattaccacttgaggggttatagatataggcaaaaatatctttaccagcgttcaagttaacttcgctattgttagtggcacttattggactatcttgaacatatgcaccgaagacgtctgaattagaagcgagttttatcgtactattcttgtccgctgtaatggggcttttttgtagataagaggtaaagagattagtggttgattgaatatcgatcgtactgtcctgggttgcggacattggtgattgactttgtgcgtaataataaagactacctgccaatttcaaattgacatgaccattattagtggcagcaattgtgcggttagtcgtaccagtttgatagaagttgttggcctttgtgacattgatagtaccaccatctgaagcaactgctttggagctacttgatccagtgacaccgaagatatgaccaccagcattgagtgctaaattggaaccagacccttttgattcgatattaatctgaggaataccagcgcctgatgccgggaaaatagcgttgttggctgtaattgaaacttttgcaccaccggaaacttgaataccgggggcaataccatcagctgggttttgatcaattcggattaggccataagagccgccaccggcatgattgatagtcgttgtcccacctctaaagtctaaccggcctgtttcagccaattcctgtgaccaagtaccagcagtttgggtaatggtattgttaccactaaaggcgatcacttcctgcatgaaatgaagtgactgcgcactactgttgtatccaacattttcgagcaagagcgtactaccatttgcgtaagactcatttgttgggtgacagagaccatagtagttattattattaattcttagatttgtaaatttgattgttttcttttgcataccagttgagccgatgtacagttgtgttgttggtgctaggacagcaatatcagcaatatttaataaatggcgctgtccggtcgttggattggtgccatcgatggtaatgtcttgagggttatttttaccgatttgaattctagcaagcaagctttcgagcacattcaatgtgatatcagctgttagttggacgctttcgccattttctaaagccgcttttaattcggctgcattcgcaacgggcgtgagaccggctttgacaccaggattttgtgtcacaagtggtttgattggttcaactggctcttgcggcggtgttttaatcggttctgattcagattttgctgattcttcagttgttgagacggatgacgattcagcggattgtatattgcttggatcgtctggttcaacgaggactgaagattgggattcacttggtggggctgatgctgatttctcagcacgactaacatgaataggagatagtagtgcagtcgatagacttaataataagagatacgaaacgggggtcttcatcagcatagcctccttggttgatcttatatcttataataatcataaataattgaaattaataagtcgataaatgtgattcggtgagcaaaaatgattgacgcccgatatcagatttgaaaatgatagcgctgtttgttagccgccaaaactggtataatagggataatcagattcatcggaggagtgatcatgatgaaaaaggtagatagacagacacgtattgaacagattattaatcaacaagtgataacaacccaagaagaattattagcaacattaagagatgatggtattgacgctacgcaagcgacaatttcacgtgatattcgtgaaatgcaaattgttaaggcccgggatgtgaacggggaattgcggtacacggtttttcatgacgatgaacggacgcaagaacaacggttaaacgataagttacgtgaagtcgccttgacgattacgcaggttcaggtgatgaacgtgattaaaaccgtgcctagtaacggtaatctactagcagcgttaatcgacgacttagggtatgaggatgttgttgggacgcttgctgggcatgatacaattgtggttatcagtcctgatgaagcacatgcggcagatttaaatcaacgtttttcagcacatttagcggtaactaaccgaaattaacgactaaaaattaattaaagggcgccaataagttaggtattaagaactaacttattggcgcccttttttcaggagattaggtattcgcaaaagcttatctgattgatttgaccactattgaacaaacgattcgcaatcgatagtctaaaagctgatttttagcagaataagcgcttggttgtaagccttatcaattgacacttgttgtttatcttcttaacatgaataatataaataaatttatgcaatgacatttattaggaggttactgatggcatattatctagaatttgaccatgtttcaaagatttatcgcggtggtaataaggccgttgatgacattagcttcacagttgatcaaggtgaattcatttgcctaattggcacgtctggttccggcaaaacaacgacaatgcgcatgattaaccggatgattaatcccactcacggcacaattacactggctggtaaatcgttagcggacacggaccccgttaaactacggcgcaaaattggctacgtcattcaaaatatcggattaatgccccatatgacgattcgtgacaatattacaatcgtgcctaaactattaaaatggtccgatgaagaccgtgaaaaaaaggcacaggaattattaaaactggtagaattacctgctgattttttagatcgttacccaagtcaattatcaggtggtcaacaacagcgaatcggtgttatccgagcgttggctgctgggcaggatattattttaatggacgaaccatttggcgcacttgatccgattacacgagaagcactccaagatcttgttaaacaactccaagttgaaatggggaaaacagtgatttttgtaacccatgatatggacgaagcacttaaattatcatcacgaattgcgattatggatggtggcaaaatcattcaatatggcacgcctaatgaaattttacgacaaccagccaacgattttgttaaggacttaataggtcacgatcggttattggaagctaaaccaaatgtcgaaactgttggacaaattatgctgaagacaccggtcacgattacgccagatcaatcactgagttctgcgattaaattaatgcggcaacgacgggttgatacgttgttagtcgttgacgaccaacagctgcttcaagggttagtggatttggaaaatattgaccatcattacaaagatgctggtaccgttcaagatatcatgtcgacgaaggtcaactttgtgaatcaaaccgatctggtccgcgatacaatcgaacggatattgaagcgtggttggaagtacgtgcccgttgtcgatgatgaccatcgcttagtggggattgttacgcggacagcgcttgtcgatgtcgtttacgacgccgtttggggcgatgacgagccagacaatgcaacagactaaaggaggccagagcaatgcttaattttttaaatcaaaatggggccgacttgctaattaaaacgtgggagcaactttacatctcggccatcgcgttattgttaggggcattagttgcagtaccgctcgggattgccttaacgcgtgttccgaagacggctaaagtcgtgattgcgatagctagcatgctccagacggtgccgtctttggcgctgttagcgttaatgattccgttactcgggattgggaaagtaccagcgattgtggccttgtttatctattcgttattaccgattttacgcaatacctatattggcatgaacgatgtcgatccggtgttaaaagatagtgctaaaggtatggggatgacgccgctccaatcaatcatgcaggtggaagttccgatggcaatgccagttatcatgtccggcatccggttatcggcggtttacgtcatcgcttgggcaacactagcgtcatatattggtgccggtggccttggcgatttcatcttcaatggcttaaacctatttaagccagacttaatcatcggcgggacaattccagtgacgattttagccttgttggttgatttcttacttggtcgtcttgaaaaaagaatgacacccgttgccattcgctaaaggaggtcgctatgttgaaaagattaaagaaaatcacagtcttaacactgcttggtggctgccttttgctattaggcagttgcgggttgcccggtcttggtggctcggcgaaggatacgattcggattagttctcaaagtacgacggaatcccaaattttagccaatatcgtcagtcaattgattgcgcatgaaacggataacaaggtcgaattggttaataacctgggttcttcaacggtgacgcacgaatcgttaatccgcggcgatgcggatattgcaacgagtcggtatgcaggaaccgagatcacggggacgttaaaaatgaagccaacgaaggatcccaaaaaggcgcaaacaattgtgaagcgcgaatttaaagaccgctaccaacaaacgtggtttccaacgtatggctttgccgatacgtacgccttcatggtgacgcagcaaatggctaaaaagtaccatcttgaaacggtcagcgatttgggccgggtggctaagcaattaaccgctggcgttgactcggtgtgggtcaaccatgaaggggatggctaccaagaattcaagcaaacttacggctacgattttaagaaggtagcgccaatgcaaattggcttagtctatagcgcacttgcggccggtaaaatggacgtcgtcttagggtattcgactgatgggcggattaagagctacaacctgaaggtcttaaaggatgaccggcactttttcccaccatacgatgccagtctagtggctaccgatcagattttaaaacaacatccagaactgaaaccactcttaaaccggttatccgggcaaatcaatcttgatacgatgcaaacactcaactacaaagtggataacgacttgctagaacccgctgtggtggctaagcaattcttgacgcaacatgattactttaagaaaggagccaacaaatgacgcatttaaacacgtggcaacagctactttattatttccaacataatggtggttacgttttaagccaatttaaccggcacttcttaatttcaatctatggggtgttactagcggccatcattggaattccgattggcattttgattgcgcatcgtaaaaaaatgagcgatgtggtaatcggtattgccaacgttattcaaacggtgccgtcgttagcgatgttatcgatcatcatgttagggttaggcttaggcactaatacggtgattatgacggtctttttatactcgttattaccaattatcaaaaatacgtataccgggatgattaatgtctcaccaaatattctggattccggtctggggatggggatgaccaagtggcaattattgacgatggttgaattacccctgtccttagccgtgattatggcggggattcgcaatgcccttgtagttgctattgggatcaccgcgattggctcatttgtcggcgccggtggtttgggtgatattatcattcgagggacgaacgcgaccgatggcggtgcgctgattttagctggggccttgccaacagctttgatggcaattatcgccgatctcgttttagggttcatccaacgccgtttagaagcaccacaagcgcatcattaaaagcgctaaaaaaggggccaagacaaaagtgaattttgtcttggctccttttttagatatccgaattctaatccttaggagatacccaactgatgacacactttcttttatttggttatgaaagataaggttcaaatgcatcaggaactggggctgtaacggttcggggttgatccgtgtaaggttctgtataccgcaacgtctgaccgtgtagtaagagccgcggtgttgtatcggttgggttatagagtggatcacctagaattggatgaccaatactagccaagtggacgcgaatttggtgagttcggccagtttcaaggttgaccgctaatactgcagttgcgcccttccgacttaaaacgcggtagtgggtaatcgccgataaaccgttgatgtaatcaacacaacgttgacgatcattttccgggtcgataccaatgggtgaattaattgtggcgtgttctgccaattcgtgttcgggatcattgacgatagcaatgtactggcgggccatctttttttgactgagttgacggtttaaaattccgataacaatcggcgttttgccaatcaataagacgccgctagtggcttcgtcaatgcggtggaccatgtaggcctttttgccttgttgggcgagataaaaggcgacttggttcattaatgtcccgttttcgccagggcggttgggatgggttttaataccagcaggcttgttgacgatcaataaatcgtcgctttcaaataaaacactgaatgattgtgtcgcatctagttcgtagttttgaactttgacggacacttctgaaaaattcagcgtgatttcatcgccaggttctacgttgcggttaaacgcgcggtattgtccgttgacgagtatttcacgattaatccgcaagaagtgttgcattttttgcggcactaaccagtgattgagaagtccgcggactgacatcggactaaagtctgtttctaaagttacttttttttggtaaattatcatcagagtaaaccaccttcaagctaccagtttagcgaatttagcactaaaagtaaattttaaaagattattaatgtcaacgcactggcataaggggcgtactggaatatgctacaatataacaaagtacgatgtaaattgattaaaagagggattgtatgaataagcaggattcgccgatttggttggcgattaaacgtttttttaaacgggcgtggcgagtcgtgaagtatgtttggtatcgactgcaattaaggcgatggttgattttgggcatattacttttagtatttttcatgagtagctacttaacctttaaagcaaaaacggctaacgttggggaaattaaggccaacttacaaacatcaacaacactttatgataaaaaagatgcgcgggcgggcaccttatacacccaaaaagggacgtacgttgaattagataaaatttcacctgagattcaaaatgcggtgatttcgacggaagatcgctccttctatacgaatccgggctttagcgtcaagggcttggcccgcgccgctgttaacttagtgattcatcatggtcagattaccggtggggggagtacgttgacccagcagctcgccaaaaatgcgaagttgagtcagaagcagactttttcacggaagtttgaagaacttttcctagcggttcaaattacgaagacttactctaaaaaagatattttggcgatgtatttaaataatgcctacttcggtaacggggtgtggggtgttcaagatgcttctagacggtacttcggtaaaaacgctagcgaattagatgctagtgaagcggctgtgattgctgctatgctccgaagcccaagttactataatccggctgatcatttggataacgccacatcacggcggaatttaattctcggtctgatggttgataatggtaaattgactgagagtcaagccaaggcagccaagagtgaaacattggtcgttaaaaataccttggaacaaaacgatagttacaaatatccttactactttgatgaagttgtgagtgaagctgttaagcggtttggtctcaaggaagaagatcttgttaaaaacggctataagatttataccgcactcgatcaatcacaacaaagcaagatggaaaataccttcgagcaaaattggttgttcccagacaatgcggctgatggcaccttagtgcaagggagctcaattgccatcgatccgaaaacaggtggtgtatcggccgttgttggtgggcgtggcgattacacgattcgcggttatagtcgaatcactcagatgaaacggcaaccgggttcgacgattaaaccgttggccgtttatacaccagcgttagaagatggctatcactacgattcttctcttcaagataagaagaagagttacggaaccaataaatatacgccaaccaacccagacaatgtttataccggttcgatgccgatgtatcaagcggtggctaacagtacgaatgcgcctgctgtttggttgttaaatcaaatcgggcttaaacgcgggattaagtcggtggaagatttcggcatttcagtgcctaagagtgaccaaaatctagcgatggcccttggtggttggcaaggtggggtttcaccttatcaaatggcgagtgcttatacagcttttgctaataacggggaactttctgagacccactttattcgaaagattgtggatgccagtggtgccgttattgttgataacacgacaccatcgaaatcgcgaatcatgagcaagaagacctctaaagaaatgaccagcatgatgttgggcgtttataacagcgggactggtcgatatgccaaaccagatggctatcaagtcgctggtaagtctggtagtaccgaagtacctgacagttacggttacgggacgaaggatcaatggttaatcggttatacgccggatattgtggttgcgacttggatgggctatgataagacggatcaagaacactttatgaaaaataccagtatcgacggcctagcgccgatttttaaatatgaaatgcaacagttattaccaacgacggcccaaaccaactttgatacagaagacgcccaatcgatggctaaaaaagaagacgatcaggattctgataaggttgtcaattcgcttcaatctggaattaaagatggtgtaaataaagcgaaagaaacggtcaatcaatggtataataacttgaaaggtttttttaattaaattcatgtaagggagtcactactatgacagtcaatatttatgatgatgctaaccaaatggcaactaatttacaaacattaccacaatttttaggcttgcaaaatgcttttgcagcacttaagaaggatgatattgccttcacaatgttcaagaaattccaaacacaacaaatgactttacaacaaaaacaaatgcaaggtgaagaattaacggatgacgaaatccaagaaattcaagaacttgctcaaaaaatcggtgatatcgatgccatcaagaacttgatggaacaagaacgccaattaagccaattgatggatgaattaaaccaaatcatctcaaaaccaattgctgatatctaccaaggctaaaccgtattttttaagagaagtatcgagtcgcaaatcgcgaactcgatgcttctttttttagtgggaaggcgcctttctaagccttagttgcaatgctataataagacatattactaaaatgggggataacgatcatgaaatttattcacgcggctgatgcgcatattgatagtccgtttgtgggactaaaaaaagcgtcaaccaatttatggacgacgattcacgaatcaacttttaccgcctttgaaaaattagtgcagactgccattgatgaagctgttgattttgttttattagtgggtgattcatttgatcaagaggcccagagtttgcaggtccaaaactttttgaaacaacaatttgaacgcttaaacgctgttgaaatcccagtttatctcagttacgggaatcatgattactgggatcccaatcaaattcatttcgattttccgaaaaatgtccatgtttttacaacggctgttgaagctaaaacactaacaactaaagcgcaagaaacggtcacgattgttggttttagttacgggcaacagtggttagaaacggatcaaacgacacaatttccaccacgagctgccacaacttatacaattgggactttgcatggtagccagagtacgacctctgatgcggatcattacgcaccgtttacgttaagtgaactcaaccaactacaatatgattattgggcgctaggacatattcataaacgccaaatcttacaagaacggccttatgtgatttacccgggtaatttacaaggtcggcataagaacgaacctggtgaaaagggtttttatttagtgacagctcaagccggtcaattcgagcttgaatttaaaccgacgatggtgattgaatggcaacggcaacgatttgaaatccctgaaaatccaagcttgaatcaattgcaagaagcgttgagtcagcaattagcacagagtgaaacggcgagtttggtggctttggaattgacgcacgctgaacggttatcgagtgatttgattcaacgtgtcaataatggcgaattactcgcttatttacaagcagccctcgagtctagtgctgtcatgcattggccatacgcgcttaaactacagtttgcggcccaacaacaatttagccagattgatcaggcctattggcaatcggcggctgataagatctttacgccagattacatcttggaaaaggcccaaccgcttctgaaagaaaaattcatccgagaagcactcgaagaacccgattttcaagatgatttgaagaccgcggccgaaacgattctacaagaaaagaagctggaggactaagcatgcggattaaaacaattaacatctttggctttggtaagtggcacgatcaaagaattgatttgcaaaccgattaccaggttttatacggtcaaaatgaagctggtaaatcaaccatcacggcttttatcaaaggcgttttgtttggttttgcaactggtaagcaaaagtatgaacaatacctccctaaaagtggcgcgcagtatggtggcgagttaatcgttgaccaccacgatcgcgagattacgattcggcgggttgctggtaaagccggtggcgaggtaaccattattgatcagggcaaggagtttggtgcggattatttgaaccaattgattgcgcctgcagacaaagccctctttacgcaaatttttgagaccaatcaacaggatctaaatcagatttttgggctaactgccgatgattttatgcaacatcttttaacgattggtgcggttggtagtcatgaatggctcgcttttgaagctagcttagataaggctagtcagcaaatctataaaccatccgggcgcaagtggccacttaataaggccttaaagcagtatccggaaatcgagcaggctgttagccaggctaaagcggctaatcagcaatacgaaagtaacgaccaacaattacaacaggcactgcagacgctgaagcaagatcaggcagcactagctgaagttcagggacaaaaaaaccagcagcaacaattactagaacgctggccgaagtatgtagaatggcaggctttacaagcatccttagcgacaacgaagccttttgacagcactttgtatgcgcaatatcaaaaaatcgaagaacaacgccaagaatctcaagcagcattagcggatgctcagcaagctgtggcgacgattcaagaaacgcttgatcaaacgggtgaattccgattctatcaaacacaccaagctgaaattgatgggttactggagcaatggtcaacacggcaaaagcaagcgcaacagttagccttgcaacaaacccagttgacgcagttgacgagcgaacaagcggcattagctgctaagtatcaatggccgacgactgaaacattaccaactgttttaagcgccgaccagctagaacagttacaagttgccaataccacctacgaacaaacgcaaacgaccaaccgcgttttaacggatcaattaacaacattgactgatcaggtggctgaacaagaacaattagtgaccactttagaaacacccgcggaagttgctagtccaacaccgatgagcaatatttgtttaggattaggggttgttggtttattaggcatctttttaccggggggcttgaaagcaattgctttgttaggactcgggttacttggttatgggttatataccaagtatcaagggcaacaaaaacaaacggctgatacaacccaaaaggcgcagtggcaacaagcactcgctaaactcgatcagttacaagccgaccttcaggaaaaacaaacagcacttgcagatgggcaacaagctttaagtaccagtcaacaacaagtcgctacgcttttaagcacgaatggttattcgaacgaagcaacggtgacacaagtcatgaaccaacaagatgccttggcgcggatgcaacacttacaagcattaattgcccaacaaagtgctgaaattaacgcgagtcaagctgacttaactgattattttgaacagtttgcggttgcgcacgattggctaggggcgcttcaaggcgaaccactgcataatttggcgcaaattgaacaatttaagggccggcttgatcaattgaaacaagctctcgcgcaggataatgaacgttatgaatatcaacaacaacaagtgacacgcttgcaaagacaagaccaagaacgacaagtgcaacaagctgacttgcttgaaaaagcccagctcaaaacggccgctgaactagcgcaatgtgcagccgctgaacagcaacgccaagtgcaacaacaacgtcaaacagatcttgaacatgaattgacaagttatttgccacaattacaagcttttgaggaccaagcagccctcgaaacggcaattgcacaattaacgcaacaaacggcgacattaacggcggcaattcaaacacaacaacagacgattgccgagttacaagttgttcaacaaaagttagttgatagcgatgcttatcaacgacaaaagcaagcacaattaaacgctgaagccgacattatcggtttagcacaagattggttggctaaacaattggcaatcgattggattcaagcgaccctaacagcagcttcacaagaacgattcccacgtttattagcaaaagctacgcaatactttgcaattctaacgcagaatcggtatattgaaattactttcgaagcggcaactttaactgtccttcgacaagaccaggttctatttgaagtcggcgaactttcacaaggaacggcagagcaattatacattgcattacgttttgcgtttgcagaagagattgccgatgttgtctcactaccattattggtagatgacgggttcgtcaatttcgatgatcagcggcaagcagcggtttggcaattattgcaaaacctcagcggtgcacatcaagtcatttacttgacggctaatccgcgaactgaggccgcctttggcacggaacactggttaaacttagagaaggtagggttagcaaatgacgactaaaaagctatttgattaccaaaatgatgaaaacttagcgctatttgttttaattaaagcagcggatgtcagagttgctaaaaacggcaagcaatttattgccttcacattccaagatcaatccggacaaattagtggtaagtattgggatgcttctgatgaagatgtggccttatttacaccggggaagattattcatctccaaggtaaacgggaactttatcaaagtaatccacaaattaagatctataaacttcggttagcgactgaagaggaaccacaggtcattgaacaatttatccaaaaagcaccggtacaaacggccgatatggaagaagaaattagccaagtgctttttgaaattaccaatcctaattggcaacgattggtgcgccacttgattcaaaagcatcaagcggacttcttcagttttccagcggccaagactaaccaccacgcttttgcgggcgggctagcctaccatacgttatcgatgttgcgactagctaaaacaattgccgcccaatacccacaaattgatgcggcgttattgtattcaggggtcttgttgcacgatttaggtaagacgcttgaattatcggggccggtttcaacggaatacacagtgcgcgggaatttaatcgggcacattgtgttagttgatgaagaaatcgttaaggcttgtgagacgctaaaaatcgacatcaatagtgaagatatgttagtgctgagacatgttgtcttagctcatcacggtttaatggaatatggttcaccagtgcgaccacaaattttggaagcagaagtactccatcaaatcgatgaaatggatgctagcattacgatgatgactcaatccttgcaacatgcagaagcggggcagtatactgaacggctctttgcaatggatggacgtcatttctaccgacccgttaacgatcaacaattaacgcaggattaattaaaaaaagagcctcaaccaaacagtaatctgtttgattgaggctctttttagatgtgcttattttgatgatgatttagctgatgattttttagcgttaacgccgtagcttgaaaggatatctgataaatctttatccttgattgttacgtcggctttcttaagaaccttcgtgtaaaccttagccatcactgtttgatcattagcccacttagcataaacttggtcagttaatgtcttcttgtgatcagccatcttacctttaccagggttcttgatcatgcggataacgtggtaaccatatgatgtcttaacaggtgttgttgtgtattcgtttgtcttcaacttgaaggcagctgttttgaatgttggatctaatgatgtatctgtgctatcaaagacaggtaatttaccgccgtctttcttagtaccagtatctgttgagtacttcttagctaaagcagtgaagtttttagttgagttgtctttcttaagttcagaaataactgtttcagcagtatctttcttttcaactaagatatgttgtacttcaacttttggttcgtatgttttccattgtttcttcaaatcagcgtttgtaacttttttgttagcttttaaagcagcgttagctaacatttgagttgtgatttggtttttgaatgaagaggttgttaaaccactttgtgcaagtactgaagtgaaagatgaaccgtattgtttcttgtaagtattgtaagtcttgtcgattttcttagtaagactcttgctaccatattgttcttgaagtgctttttgcaagatcatttgttgtacttgttgcttgccggcagaagtttccttaatttctttgtagaattcgtcttgagtgactttaccacccttaagagttgcgatagtgttgcttccacaacctgctaatgtaactaccattaatagactggcagcggctaatagccattttttcatcatatgacacatccttataaattattgtaaatacgattaataccgtgaattcatcaattaatataacacatgaacccgctgaattaaatccgagagcgaaaatttcacagaaccttcaaatttagcttttttatgaatacgtccgtgaaaggttgataaactgcgttatagcgcctttaaatcgtccgtaagacgtttgattgattctgaaatttgtgcaacccggggttgagcttcaaacgaaaaagtttgaacagcatcgctgatatcagcgagtgaatcaacagctgttgttttgatttcgttagacagttgaccggccgtgttttgtaaatctacagcgttactttgaacagtttgtgcttgcatggtaacgtcggttaaataatggctgattgcttgttgacgttctaagcccgtttttttagcggttagtaacgcataggttgtgccaagaaggccaccaatcagtaatccttttgaaaatgacatcgttaagcctccaattgttgcttaatcgcgtcagcaatcgtttgtaacttctctggtgtataatccgctgagttatcagcaaattgcattgagaagccgtctgctgccgtgtaacgagggagtaggtggatatgagaatggaaaacggattggtaagcaacctcaccgttattattacaaatattcatccctttaatcgcgggattgctggccttgattgcattcgcaatcttgggtactcggctgaaaaccgcagcagctaagtcggcgtcatattcgaaaatattggcaacatgttgctttggaatgaccaaggtgtgaccgggtgtggtctgggtgatatcgagaaatgctttgacaacatcatcttcatagacgacagtgctcggaatttcttgacgaacaattttacaaaaaatacaatcatccatataattaaatacctactttctataagattgtggcgctgtatacggttaatgctatcataataacgcgttttctgctactaaatcacggtcaattgagtgaatcgttcgttaaaaatgaaagggtttgttaaaattaataattgatgataaacttcgtgttaagtgtttgtcagaaaagggtatcaactaatttttaatttaaatgaatgaggcaagttaaatgagtttagaaattaaccaattaacgggtggttacgcccacgtaccagtgctccaagaagtaagttttacggttcccaatcaacaggttgtcggcttgattggcttaaacggggctggtaaatcaacgaccattaaacatattatcggattattaatgccgcaaaagggtacgattacgcttaatggcgtcacgttgcaatctaatccggatcaataccgccaaagtatggcttacgtgccggaaacgccagtcctttatcccgagttaacattacgagaacatctggaactagcgatgatggcttacgatttagatttcgagaagacttgggccaaagcgatggtgttattgaagaagttccgactcgacaataagctggactggttcccagttcatttttcaaaagggatgcgtcaaaaagtgatgatcgtcaacgcttttatgactgacgccgatttattcatcattgatgaaccttttacaggtcttgatccactcgccattcacgatttattggacattattgctgataaaaaggcggcgggggcggctattttgatgtcgacccatattttggccacggcgcaacaatacgccgattcttttgtcctattaaatcaaggtaaggttcgaacaactgggacgcttgaagaactgaaagcagaatttaacatggcagatgcaaacttagatgatatctatttgcaaatgacgaaagaaggttaatgatgcgacagttatggcaaaaacgtgttcggcaacatattcaagaacaagttaaatatctcaaactggtttttaacgaccatttcgtcttagctttaattttcctattgggtgcattaggctatacgtatgctaatgccgtcaaagggctggatccacaagcgtggtggcttaaattgctattgagtctcgtcttattagcggcagttagctgtgggcgctttgcaacattacttaaagaagcggatagcgttttcttattacctaaggaaagtgatttacctgtttatttaaaagcggcgcggggtcacagtgcctggctgccggtaatttttaccgggctagtaacgggattaattgcaccaaccctgctgattactaaatccgtaccgagctggcaattactcctagtttgggccacattaatcgcgatcaaagatcgccgcttttcaaatcaattattgaattggtaccagatagatgccaagttacctaagattgtttggttactagttgattggttgttaattggtagtcaactctttagcggcttggcaatcgctggggttttaatcgcaattggcttggcttattatcaacgacgtcaattgacaactattcaacagacaacattgtttgattggttggcagcggtcagcgcagaagattctagaatggggcgtatttatcgcttatacaacctctttacagatgtaccggggttaaatagccaggtcaaacggcgccgttacttagattggctattgccagttgctaagcgtagtggtaatccatatttgtatctctacacacgtggttttattcgcgggaccgagtttagcggattatacgttcgcctagtggttttaggaggcatcattctatgtttcagccatctgtggtggttgagcttagcactaggtttgttattaatctacttagtcggcttccagttgctaccgttttatactcaatatgaacaaattatttttacccatctatatccgattgctaagcaagctcgcgtgaaagctttccaacaactgttattaggtttattattgtgccaagccatcttgtttagcgtgatactgctagtgacgatgggcttggacctccaagctgggttaagtgttctggcgttattcgccttagttggtgtttttgttcagttctatttaccacaacgattagttaaataatcccgaattcaaaggggtgcctacttgacgtagcacgtgtgcttattatatgatactggtagttaaaaatcagttgaagcaacgcggtgccacggggtaggcaccttattttattgtaaaggagtcgggtggatgaatttcgacttagataccggttggcaagtacgttcagctggtggtgatacgggtgccgcttatttaggcgtccgtgcatcagagaagatatttttaaaacgaaatacgtcgccatttctagcggctctttctgcagaaggcattacaccacgtttaatctggaccaaacggatttcaagcggtgatgtgttaaccgcacaagaatggctaaatggtcgtacgctcaagcgtgatgagatgaatagtccgcaagttgccaagttattggcgcgggttcatcaatctcatctattaaagcgcatgttacaaaaggttgggggtcaggtctggcaagcaccagagatgttgcaaacctacttctatgatttaccgcaagatttgcggcaacatccttttttagcacaaacgagtcagtatttaaaagacacgatgtcagcattacaaacaccttctttagaggtgtgtcacggcgatttaagtcataagaattggttgttatctgatatcaatcgtttgtacctagtcgattgggattcagcaatgttagctgatccagctgtcgatttcggaatgattttatttcaatatgttccacgtcaagaatggcaagagtggcttgaaaactatggtttagaggtaacgcctgaattattgatgcgcgttaactggtacggtagtttgaacctactccaaagcattaagcaccattatcaacgtggtcgttttactgaaatgaaccatgacatattgcgtttagaagaagttctttctgaaataattaaaaaaaattaaatgccaaagagtgtgccaacaggtgttaatattctgaggattagcatagtctggtgaatggccaacttgttggttatttgctagacgtcgctaaacgcaggaatatgcctgctggcacacgtttatcctaatcagattgcggggccgagacaaaatgacttttgtcccagcctcttttaattggcagcaaatgaggagtttattatgcgtttaagaaacaaaccttgggcagcggatttgatcgctgaaaacccagacatgattttggtgagcccagaaaatattgccagtaactggcaaagtcgttttgccaaggaacaaccaatctatatcgaagttggttcaggtaaagggcaattcattactcaaatggctcaaaaatacccagaccgcaacttcatcgcggttgaaattcaagaatcagcgattgccgttattttgcaaaaacaagttgaattaaaactccctaatcttcaattattgttagggaacggcgcagcattgacaactttcttcgccgaaaacgaagtcgcaggggtttacttaaacttctctgatccatggcctaaaacgcgtcatgaaaaacgacgcttaacttataagtcattcttggctgaataccaacaaattatgcaaccaacaggttatttacgtttcaagaccgataaccaaggcttgtttgaatactcattagccagtttaaatgcatatgggatggtttttgacgatatttcacttgatttacacaacagtgatttagcagaagacaatatccaaacagaatacgaagaaaaattcagcaagcgcggtcaagtcatttacagattagaagcgcactacaaatagcgtgttttttaaaataaccgctcaagccaaataaaaacacttaccaatttcggtaagtgtttttatttgttttaaagttgtgaaaactcaatgacaacccccgttttagcatcaactttgaagtgaaattgatttgtgccttcatcacgttcgcagatgataccgccttgataaaccgggaaagtccgtttgttttgtgaaaataggtgaggactttcttcaatccatgagccgacgatttgcccttcatgacgaaggcttgctttgacatcttctaaaatcttgtcgagcttaaccatcttttgttgggttttatattgtctggtgccggctgctgccgcaacggctagtccgaaaccagttaagagatattttaacgtttgactattttttttcaaaaaaaaactcctcagtaaatttatctttaaatagtatagcacacttttttgaggaacaagagtggacatttgaccacaaaccgcttatattaaaacgagtagttaaattgaaggggtgcataatgaaagaattcgcaaagatggcagaaacaaatctaacccatctcattaccaaaggaaaacatgtcttattttttacagcaacgtggtgtagcgattgccggtttattaaacccgcaatgcccgaaatcgaagctgaattcccagaatatgaatttatcgaaattgatcgtgatcaatacatcgatatttgtgaagaatgggaaatcttcggtattccaagctttgttgtgattgataatggccgtgaagttggtcgttttgtgaataaggaccggaagacaaaacgtgaaatttcagaatttatccactcattaagttaattttaaaggagtcataaaatgctaattgcaagtatgaaccaaaaatcttttccaaatattctcgttgtgatgacccaaccagatgttgctaatcaagtaacgactgagaaacaatcaattgtcagaattagcgaccaagcagatcagacaattggctataactttttagcaatcgatcaattattacctgaattacaatttaacggggtccaagccctcagtgttgcggatgtcgcaactttaaatcaagcacttgaagctgctggcttcacacctgatttagttgctgatgaaacaccccacatcgtggttggttatgtacaggaatgtgtggttcatccagattcagatcatatgcacgtgacacaaacgcaaattgcacctgatcaaacggttcaaatcgtttgtggggctgctaacattgctcaaggtcaaaaagtgattgtcgcaacagttggcgcagtgatgccagaaggtaaaatcatctggcctggtcaattacgtggcgttcaaagcgacggtatgatttgtgctgctcgtgaaattggcgttgaaggtgcacctgctaaaggcattatggtcttaccagatgattgggaagtcggccaagcagtgacggctgatgcagttgccgcactattaaaataaataagtaacttacgaatttgttatgggcttattaaaaataaaatagtatgatagtaaataacaattaattagttaacaccgtctaattaattgttatttagtttttaaatttttctgaaaataattaattaaaagtctaataagtattgtttagatatcggactatcaaagaggagcttacggtatgtgtgggattgtcggatttgctggtggattgtttgatttaccaaagaaaaaagaagtattgaaccaacaaatggatgtcattaaacatcgtggcccaagtggtgcgggtgatttcattgatgataaagtggcgcttggtttccgtcgcttatcaattattgatttaactaaaggtgatcaacctatttataatgaagatcatactaaattgattttctttaacggtgaagtatataactatcgtgaaattcgtaaggaattggaaccattaggtcacgaattcaagacggattcagatactgaaacaattttgcatgcctatgaacaatggggcaaagatgttttgaagaagattcgtgggatgtttgtgttcgtgatttacgatttacaaacgaaaacgttatttggtgcccgtgatttcttcgggatcaaacccctttattacacaacgcttgatgatggcacctttatgtttagtagtgaaattaaaacattcatgcgtcatccagaatttaagcggacattaaacaagaaagctcttaaatcattcatgatgaatcaatataatgatttacaagaaactttctttgaaggggtcttcagattccctgcaggtcattactttacttacaaagatggccaattagatattgaaaagtattgggatatgcaatttgatccttctaacttatctttcgaagaagaagttaagaaaattgatgcttctgtcgaagaatcaatcaagatgcacaacgttgctgacgtaccagtgggtgcctttctttcagaaggggtcgatagtagttatgtaacaagtatcttgcaaccacaagaagtctttagtgttggttttgacgaccaaacttataacgaagtaacagccgctcatgctttggcagacgaactgggcttgaacttcaatgaaactaaggttaaagcggacgatgcgtttgctgaatttgataaaatccaatattacttggacgaaccagacgggaacccatcatgtgtgccattatggttcttatcacgttttgcccgtgaaaaagtgaccgttgcactttcaggtgaaggtgctgatgaattgtttgccggctacgttaactacggaatgcattcacacaatacaacaatcaaggctttcacatctagtttgaagaaattaccaaagggtgcccgtgctaaattggcgaagacagtcaaaaagatgccagcattccctggtcgtgttcatttatatacgaacttggctaaccctaaggaattctatgccggtcaatcagtaatttatgatatcgaaaacccaagtatttttggttcagatgaagccaaccaatacttgaaacccgcttatcaaaatgacacaacaattcaagaaaattatcaagcagactttgaccgcgtcaaagatgctgatcccgtttcacaaatgcaatacattgatatgcatcactttatgttaaatgatattttacaaaaagctgataaactatcaatggcgcacagtttggaactccgggtaccatttttagacccagaagttgctaaaactgctggtcaagtgccgactgaatacttgattaacagcaaggatactaagtatgcttaccgtcaagcatctgctaagcatttaccagccgcttgggccaacagacctaaattaggtttcccagtgccaatcaagcaatggttagaaactgacaagtactatgaacaagtcaaagcgctctttagcgaagatttcgtcagtgaattcttcgatcaaggccaattattagcgttactcgatgctaataaggaacaacgcattaacgggcgtcgtaagatttggacaatttacacgttcttaacgtggtacaaggtttacttcatcaacatcgaagattatttagtattaggttaattcaaaagaggttagggcaaaaatattttgccttaacctctttttttgataaaatagcgttttttaaggattcattatttagctcaaacgcctgatatggtaaacttaaagggatttgattcaaatatacttagtgactttctgaaaagaggacatttaaaatgataacaagtgaaacggtttaccactttgtgggcattaaaggatcagggatgagtgctttagcgctcgtattaaatgatttaggctatcaagtacaaggctcagatatcgaccaatatacctttacacaacgggatttagagaaagcagacattaagattttacctttctcagccgataaccttcacgaaggcttaacggtaattgccggcaatgctttccaagatgatcaaattgaaattaagacagcgctcgaaatgggcttgccagttgtgcgttatcaccaattcttaggcgaactcttaaaaaattatacaagtatcggtgttgctggtgcgcatggtaaaacaagtacgagtgggttactagcacacgttttaagtggcgttgccaaaacaagtttcttagttggtgatgggacaggtaagggcatcaaggatgcacaattcttcgcttttgaagcggatgaatatcgtcgtcatttcttagcttactcaccagattatttaatcatgaccaacatcgactttgatcaccctgattattatacggggatcgaagatgttttcgatgctttccaatcagaagcttacaaggttcaaaaagggatttttgcctggggcgacgatccagaattaagaaaactaaaatcaaacgcaccaatttattactatggaactaaatcaaatgatgatttccaagcacgcaatattcaacggactgttgaaggatcagaatttgatgcttattatcacgatgaaaatatcggacattaccacgtgccattatacggcgaacacaacgtacttaatagtttagctgtcattgccgttagttacctcgaaaaaattgatggtcgtgaagttgcacgtgaattggcagacttcaaaggtgttaaacgccgctttactgaaaagaaagtcgcagatgtcacgattattgatgactatgcacatcatccatcagaaattaaagccactttggatgcagcccgtcaaaaatatccagatcgtcaaatcgtagcggtgttccaaccccatacatttacacggacaattgcattgatggatgattttgcagctagtttaaacctcgcggatgaagttttcttaacagatatcttcagttctgctcgtgaaaaatcaggtaaggtttcaagtgctgatttaggtgctaagattactaagggtggtcgggtccttaaattggataatatgtcaccattattagattttgaacaaccagtagtcgtcttcatgggtgccggcgatgttcaaaaatatgaatatgcttacgaagaattattaagcaacttaagtcctaaggataattaaagattcaggcaagatgattgtgttttagtcattttttgttacaatattgctaaccgaggattatacctcgttagaaatattaagaggtgattattcatggatggaagacgcgttgtcaatgtcgatagcgaatcacgattttttagtaaagtatacggattaatggctttaggtgttggtatttcggctctcgttgctgttttactagtcacagtttttgcaagtcaaaccgtagccattttaagcaatagtaatacttggatggtctggggattaatgattgttgagatgattttggtcgttcagattagtcgcaaagcaaccaagaatccgtcagcatcaatgatgatgtttattgcttacgccctgttgaacggattaacgttcacggtaatcttgttagcgtataacatcggtcagattggcgccgcatttatttcaagtgcgttagtctttgtcgcgatgtcagcttatggccggatgacgaagaataacttaagtggttttgggaagtttgccatgatgggcttgattgggattattattgtaaccatcgtcaatgctttcatgggctcagctgcaattgagtacttcttatcttacgcgatgttaatcgtcttcattattttaacagcctgggataaccaaaaactaagcttgttatatcgtcaatacggttcaactggggaagtttcaatctcaggattagccgtgatgggtgctttaacactttatctagatttcgttaacttatttattacaatgctccaaatctttggtttcggtaatcgagactaatttaaaaagagtgtgttgtcagtgtttagcttttgagtatttgtagaactgggcgaatcggtgatgaaatcaccaatttgacaagtttagcaaaacgcagaaagttactgacaaaagcacgtttatactagcaacattcggttatcaagaaggggtctgagacaaaagttacttttgtcccggattcctttttttatatgtgattatgtttgacataatactatgtaaagtatagtattatattttgaaaggatgatgacatgaacgcgcaattaaagaaggggttgttagaattttgtgttttagcaacgcttaaaaaagccgattcctatggctatcagattattaaagatacttcaagcgtcattgaaatctctgattcaactttgtatcccatcttaaaacggctcgaaaaacaagaacagattgaaagttatcaggtggctcataacggacgtttacggaaatatttccatctaacaccaattggggcggctgcgattgaacagtttttaaatgaatggacgcaagtaacagcaatctatgagtatattaaaggagaagcataatgactaaaaatgactttatcaaagacttagcagcagctttaacaagctatggtgtgagtgatgctgccaatacaattgattattacgatgaattgattgatgatcgtattgaaggcggtgaaactgaggcggccgtaattgctagtttagagacacctcatcaaatcgctagtcaattagcagatcagtttcaaccaacacaggttcaacacaaaagaatgtcgccggtattgttagtaacgttggtcgtgttgttggtgttgggttcgccactttggggtagtttgttgttaaccgtaattgttttactcacggttggttatttattactatggattgggccttttatcggtggtacgctggctgttgctagcatcattggtggggccgttagcttagttttttcatgttttgtcacgttaaacgaaggtgcagtagtcggcatgatgcaacttggtattagttttgcgatggtgggtgttggcatcttaatcggcggtttaacgtggtatttttcgaaatatattgtgcaattttcaatcggcttaacacggtggttgattcggaaaagtaaaagacaatcaaaggcggtggcatagatgttcgcaaaaattcgaatgaattggtttaaaattgggttattgatggttgtgattggattggtgatcatgggcgtgagttatgcgcttggtggttttgatagtcgtatttttcaagagcagggtaatcatgattggtttagaacgtttaatttttaggataacaaaaaaggcacgcactacagaattttgtaggacgtgcctttttaaacccttatttcaccaacaaaacgttagctttagcgtggctgctgacgtattgggcgaccgaaccgactagcattcgttcaatagcgcctttaccggtaatccctaagacgatgaggtcaatgccaaattcctcagggatgcgaatcgcaatttcttttttaggagaagcaacttctagaattggggtaatcttttcaaggccgtggttgtgcgcgtaacgcacgttagcggcgagttgagattttacccgatctttctccaaagcggtcaccttggcgtacatactcgcatctggcgagacgaaaatatcattcgggacaattcgggcgataaataattcagcgttatttcttttagcaatttcaacagcttccataaaagctttattagccatatcggaaccgtcgacaccgacaaggattttttgatatgttgttgacataagataacgtcctttctaaatagctgattgttaacattagtatattaggctgccgggctttaaacaatttaaacgcttgcggaatatgtgcggttcttgtgtggcaaaaatattttcctgcataaaaaaatagatgagaacgttgatttaacaacgttcccatctattagaattgtaccgaatgacgctaaaatgtcacaggcgagattcgaactcgcgacctacggtttagaagaccgttgctctatccagctgagctactatgacaaaaaagattggttattgcttttagaatatcaagcaacatgctatattataagcaattgaagtatctgatgtcaattgaaattcgcagaaatggggtaaaaaaatgaaattaaatcagtttgcacggttaacaaccacttattcggaacaaataaaggccttacaacggattaagctccttgatgaaggttatgaagcattgtcagttcaagcgttagcacaacaaatattcgcacggttcttcccagaggcccactcaaaaacggctcaaaatgaacaaatgcaaaaaatccaggcgacggctagtttaaacttagccgattatttggcaggcatctcaacatcgtttgatcagcggacgttttataatattgcattgcagttgctagggtttaaggttacaactgattttcaatttaattaccctcggcgatttatggcaaaagtcgggataccctatgttgatcaaccggtattaacccaagaactctttttagaagctgtctacctcttattaacgacccgcagtcaaaacgggttgctttatttagattgtttggctaatcgtggtttctttgcgcattggcaaaaggcgaccgcacccgagttcttaatctttaatggtaaaacccaaccggtttttgatacgcaaaactttattcgtgaagtggtttatgttgaatcaagtttggataccgatttagatgggcatcttgacttgctcgaaacgacaatctttagacctaaggaaactgaaaaaggcctacgtgtaccggccttatatactgccagtccttattacaaaggcactaatgatgtcgatgccgatctgcacaacgttgatgtgcccattcaagctaaggcggccattcaacctaacttggcggatttgaagactgggaccaatcaatctgtaccagctgctagagaaccactcggagaaacgactgaaccggaattagaagccgctgatgacagtaactacctgttaaatgattatttcttagcacgggggtttgcgacggtttatgctggcggtatcgggactcggggttcagatggcatgcggacgtgtggctcaccagaagaaacggcctcaaccaccgcgattattgaatggttagcgggtaatcgtcgggcttatactaataaaacagatcggattgaaattaaggcttggtggtgcaaccaaaaagtcgccatgaccgggaagtcttatttagggaccctggcgactgcggctgcgacaaccggtgttgaaggattgaaaactgtgattgctgaagcggctatctccagttggtatgattactaccgtgaaaacggcttggtggtggcgcctgttgattgccaaggagaagatgcggatgttttagcgaaactctgtcaaactagacagatggacgcagcggatcatactaaatcaggtgcgctctttgaagaacagttggcagctttacgagaaggtcaagatcggattacggggaattacaatgccttttgggcagaacgtaattatcgggacaatgttcaaaaaattaattgtgatgttgtcttggtacacggtttaaacgattggaacgttaaattgcaaaatgccggcgcactgtgggatgacttacggcaactaccaatcgaaaagaaactctttttacaccaaggacaacatatctatatgaataatatccaatcgattgattttacagatatgatgaacctatggttgagttatcagttgttagatatcgacaatcatgcatcagaaatcttaccaacggtgacaattcaggataatacgcaagaagcgacttggcatacccaagatgattggttaaaccctaagaatccacgtcaaacttatttcttaaatgacccagaacatctagggttagatcagacgccaacgacccctgtagcagatttcagcgatgatggtgttgccatgtttaaaaaacagcatctcagtgaggctgcttggcaggatcaattattagcaccacaatctgactttacgcaaaatcgcttattattattgtcacaggctcaatcgaagcaattggtgattgatggtcgggtacagttgaaaacgaaagttgcggtcaataccgatcgtggtttgttgagtgttatgttggttgattacggcttatttagccgcttaggcacaacaccagctattttggccgctaaggggcaacaattaggttatcactggcgctatgatgatttgaaggaattcaaattaggggcacttagtccttatcagttgatcactaagggccatctcaatttacagaatcgtcacaatagttatcaaaccgagacagtcgacgcaggtactttttatgaggtacaactagacttacaaccaacgcattaccatttagcggcgggacatcaattaggtttggtaatctatgcgactgatatggggatgaccttgcgggaagaacaacaaaatcaataccaagtggatctaggtgcgagtcgcttagtaattcctaccttggattaattgtgaatggagtgttttgaatggcagaaacaatcacttgtcgccaaaccttatcaattagcaatcatcgagtgtttgcgagcgatttaaacgaacacgagacggtctatggtgggcgactattggaattactagatggcgcggcgtcaattgcggcgagccgcttagcccgtgttgaaaccgtgacggccagtattgaccaattaaattttattgcgccgtttaaattacaggattcgttgtgtatcgaaagttacgtcgttggtgttggtcaccgctcaattgaagtttttacaaaaattattggtgaacatctacaaactggggagcgtttcttaggtttgacggcttttttaacctttgtcacgacggaaaaaacgccgaacttaccagagattgcaccaacgacggcagaggaagaatttatctgtgcgggttatggtcaaagaaaagtacagcgcttagctaattttaaaaatcaacaagcctttaatcaacaaattaatctcgattatccatgggattattaaccgaaaaagctagccactttagtgactagcttttttgatgtcttcatcaggaataatgaatagttaatgatagatgagtttttaaaatactggattggcagcacatctaaattatgataaagttggtatgcttatggtgctaacaattttaagggtttaattacgttagctagcataagtgttaattggtgtaacggaaacggttattaatgtcgttgattaatggccaaggggattatttttgggggaggattgtgacaaaatgcaacaagtgaagcgttttttttcaaaagggtctaacattatgttgagtattcttttgttaattgtttttgtgtgtttagtgattacattgaagccacgcgatagtggggtgcagtcgatcaacttagatcgtgatcgattgcagtatcgtggcgcggttgaaaagggccgtttcagtggtgatggcaaactaatgttaaaaaatggcgactattataccggccaatttaaaaatggtcggtttgaaggcgctggtcaatttatttctcatgaaggttggcagtataaaggccaatttaaagcgggtgcaccttatggtcaaggtgaactgaagaaaaaccatgtgacttataagggggatctcgttaatgggaagtatcaagaaagcaagaattagatggtttagtttaattcgcatttttggcctagggatggttttatactatcactattttaaaacaagatatgccggtggctttgttggggttgatgtgttttttaccttttcaggttacttaatcacagcactatttattgatgaatttatccggcgcgataaagtgaaactatgggcattttatcggcgtcggtttaaccggatttttccgccattattattaatggttctaatcgcggtgccgctgtcttcaattgcgaatccggatttaagaacgaatttaacgaaacaaattaccgccactttaagttttacgacgaatttttatgaaattagtacgggtggtagctatgaaactaatttcattccgcacttatttgtgcatacttggtcattagcagttgaaatgcacttttatttaatttggggcttaattgtctatcttgtttcaagaactgtcaaaagtgcgaagtatttcagaacggctatcttcagtgtttcgtttgttttatttgccgttagctttctatcaatgtttacgcaaattaaaggtttatctgaatattcaccgatttatttctcaagtttaacgcatggttatccattctttgtcggtgcgatgattgggagcttttgtggggttggtcaatcagcacaaggctttaatcaattaacgagtcgcttgacctggaagacaccattaattggtttcgtggtcagtgcgttgttattatttggtttaggaacgcgtatgaagtttgatcaagctagtacgtatgcttatggcatcttactagggagtttaatcacaggatgtctcattatttttgcacgtctattgcatgataaagcacccaacgtagctgaaccacgcttcattacttatttagcggatattagctatgcaatgtatcttttccactggccattgtacattatctttttaagttactttaacaataatattaaagcagtagtggcggccttaattggctcggttattttctcaacactgtcttattattacatcgaaccgcttttgatgggcaaaccagttgcttaccaaaaggcggtcggtggtccgttgttgtttgcgatggtgattttaggtgtggtgacagccaactatgcagttgacgcaccacatatgtcttctttggaacaacatctctgggtcggtaatctttatcaggacgctgatcaaattcaggcggttcacgctaaggttagccaacccaaacaaacggtgccagttagccaaactaactataatgtgccccaaggcattagtattatcggtgacagtgtcacattaggcgtacggagttatttattagaacacgttaaaaatagtgacattaacgctgaaggcaaccgtcgaatggatcaggcgtatgacgtattgatgaaccaacaaaacaataatcaattgcgagaatatgtcgtgatctgcatcgggacgaatgcttttccagatttcaaagaacaaatcgataagattattcatgatttgaaaaaaggacatcgtctaatttttatgaccccttacgatggtcatgcagatgcgacttatgatagtaccaaaatcgcagtctatgaacggacgttaccggctaaatacccatttatcacggtgacagattggaataagattgctgctagccatccagaagtttttgaaggcactgatgggacgcatttcggtggcattgaaaaaggcaatattttatatactaagggcattaatgatgccattaagacggctggtaagaagaccgttaaagcataatttcaaaaagagcaccaattagttagtttttaatcgctagctgattggtgctctttttagtatcaaagtaatagtggtacttggaacaactgttacgtcccttaactgttggtattagcggttttttgatgaagtagacttatggttgtaacttggttgtaatatgaatgtaacattattggtctatactataacctattaataaaacacggggtaattataaaaaatgtctttcaaaaaagtaatcacaagtgtaattgtaatgagtatggtagccgtttcagcactaaacacagccgcagctaatgcagcaacagttgatgaaacacaagaagccattacaaataataaaagtgaaacagccaaattgttaaaggatattgcaacagccaatgctgataatatcaaactacaacaacaaatcactgataacacaactaaaattgaaacgactaaaacaaatattgatcaatcaacacaaaaaatcgcaaccttaaaaacacaaatcacaagcgcaaaagccgaagttcaaaaaagaacgacagtgcttaaggcccaacttgttgcattacaaaaacaaacaggggacactgtcagtggcaatgtttactttgattttgtcttaaactcaaaagacttttctgatcttgttgcaagatcattcacagtcaataagttgaaccaagcaagtaaatcagcactagaagatgttaaagcagctaaagcagaatactcaaatttaatgacagaacaagaaacaactaaatctaatttacaatctgaaaaaacaagtcttgaagcacaacaaactgatttgaaggccatgaaggctaaatcagatcaacaacaagatgcattaaaccaaaaggttaatgacaataaggcaacattagaagcgctacaaacacaatatgatgaagctgcttctgctttaaaagttgctaacgatactaaggctaaagaaacaaaagtagtaaagactgctgtttctactaaagatacttcagataaagcagaagcaacaagtacttcaaacgatagcaaagcaagcacttcaagtaaaattgaaaataaaacaagcgataatagtgaatcaaagaaatctaatgacgatagtgatagccaaggcgacggtagcacacatggtaacgttgctggcaactcatacgcatggggtcaatgtacttggtatgttaagcaagttgcaccttgggctggcaataactggggtaatggcggtcaatggggtgcttctgcatcagcagctggcttccgtgtcgatcatacaccatcagccggtgcaatcattgtctttgtacctggtcaatctgtaggtggtcaatggactgctgatcctacgtacggtcacgttgggtatgttcaatcagttagtggcagcagtgtcacaattacacaaggcgggatgggttttgctaacgcagctggcccaaatactgcaacactttcagatggcggcagttacatgtatattcaccgttaatctttaaatgatgatcttaaaaatttagtgaaaaaggcttatcccttcgggggataagccttttttgttgcaactggttatttcaggatgaaagttcaggtagcgttcctttttaagataacaatattgtcacttctaatgctagcataagtattgtacattattaataacgagagaagattatcaattggggagggtaattaggtggcgaaacgaaaattaatgatgatcggcagtgttgtcatcacattaagtgtttttttagcgggtggctatgttgttaaagagcaaattgatcagaaagcagcccaacaagaaaaaatcgaaaaacaaacgcaacgacgaaaacgtcaaagtgaaaaagcggcgatggttaaatctgaaagtattcaaaaacaaaaagcgcgtgaaaaagaagcaactaagccaatgtcaacggtggttgctgataatacgttagatcaatattttaagcaagtcaacttttcaggaacagcattaattgttaaagataacaaaattatgcttaataaagggtatggcacagctaatgaagcggccaaaaaattaaatacaccggacacgttatatccaattgcgtcaactgaaaaagcactgatcgcaaccggtattttacaattaaatcaacaaggtaagttgaaggttaccgatccagtggcgaaatatttaccccaatttcctaatggtcagcagattaaattgacggacttactgcatcatacttctggcattgttggacgtaatcaggacaatcaagaaaagaccagcgaccaattattagctgagattattgaaaatgggactaagggccaaccaggcagttggcactatttagatgctaactatattgttttggttaagattttagaaaaagtgagtcatcaaaactaccaagattacttacaaaataagattatcaaaccaagtaaaatgatgcatactgggtttatgtcagcgcaatacccacagttagaaaatgcctctatcgggtatgaaaccaaaggtggtgttaaaaaggctgaaatgttaccgaattttagccagctttatggcgtgggggatatgtatatgacggctatggatatgtaccgttttgataaggcgctttggactcacaagttaattaatcagcagcaaaccgatttaatgtttaaaccgggtagtgattctcattatgggatgggcatgtataatgatccggcattaatcgtcaatcgcggctatctttctggttggagtgtttcaaacggctttagtcatggcggccgaatttatattgtattattctcgaatgttaagaacgataaaacgtcgttaagtaagatgaatagtgatttatacagtaaagtagtggcaacaatataagtttaaaagacgggggagcgaagggctcaaccgtctttttttgtgacttttaacccactataatgattgtgtaaaatttaatttaggcaaaacgcttccattttggacaccggtaatctataataaaaaacaaggaaacgttttccaaagaaattttgttaaaggaggattaaaatgactgaaaaatacattcttgcgattgatgaggggacgacaagtactcgctcaatcatttttaaccacgatggtcaaaaagtcgcggatgcacaacgtgagttcccgcagtactttcctgaacccggttgggtagagcataacgctaatgaaatttggaacgccgttttatcgactattgcaaacgcttttattaaatctggcattcaaccgaaccagattgcggggattgggattactaatcaacgtgaaacgacggttatctgggacaaggcaactggcctaccaatttacaatgcggtggtttggcaatcgcggcaaaccaacgacattgctgaaaagcttaagacagatggttatgaagatttaatccataagaagacgggcttgattgttgatgcctatttctcagcaaccaagattcgttggattttagatcaagtgccaggcgcacaagaacgtgctgaaaagggcgaattgctctttgggacaattgatacttggattacttggaaattaaccggaggcgcaacgcacgtcactgattatactaatgccagtcggacgatgatttttaacattcacgacttggactgggacgacgatatcttgaagcttctcaacattccacgggcaatgttacctgatgtgcggccaaactctgaagtttatggtgaaacggcgtcttatcatttttatggcagcagcgtaccaatttcagggatggccggtgatcaacaagctgccttgtttggtcaattagctttacaacccggaatggtcaagaatacttacgggacaggctcatttatcgtgatgaacactggtgaaaagccaacgatgtctgaaaataacttattaacgacaatcggttattcaatcaatggtaaagtgaactacgctttggaaggctcagtctttgtcgctggttcggccattcaatggttgagagatagcatgcaattagttgagaaatcttcagattctgaagctgctgctaaagcttcaacgagtttaaatgaagtttacgttgtgccagcttttaccggcttaggtgcaccttattgggacgctgaagcacggggctcgattcttggtatcacgcgtgggacgaaccgtcaggatattattaaagcaacactgcaatcattagcttatcaaacacgtgacgttgttcaaaccatgcaaaaagatacggggattgatatcaagatgctacgtgtcgatgggggtgctgctaataacaactacctcatgcaattccaggcagatattttaaatagtgccattgaaaaagccgcaaacttagaaacaacggccatgggtgctgccttcttggccggcctagctgttggtttttggcaggatacagatgaattagcgcaaatcttctctgttgggcagcgtttcgaacctaacatgccagaagaagaacgtgaagatctatatgctggttggcaacaagccattgaagcaacaaaaattttcaaacatcgtccatataagatgaacgaataaggaggattattatgacattttcattagaaagccgtcaacaagccattcaaaacttaaagaacgaacaacttgatttattaattattggtggtgggatcactggggcaggggtcgccattcaatctgccgcatctggtattaaaacgggtttaatcgaaatgcaagattttgctgaagggacatcatcacgttcaacgaaattagtgcatggtgggattcgctacttgaagactttcgacgtcggggttgttgctgatactgttagcgaacgtgcggttgttcaaggtatcgcacctcacattccacggcctacaccaatgcttttaccaatttatgatgaacctgaagcaacttatgatatgttcagtgttaaaattgcgatggatttatacgataaattggcaggggttactgggacacaatatgccaactacacaattgatcgtaaagaagtgctccaacgcgaacctggtttgaaatcagatcgtttgatgggtgctggtgtctatttggactttgtgaataacgatgcccgtttagtaatcgaaaatatcaaagaagctgacgaattgggcgcaacagttgccagccacgttaaagctgttgggatgacttatgatgctaatggccgcgttaatggcttgaaggcgcatgatgaattaacggatgaaacattcgatattcatgccaaattagtgattaatacagctggcccttgggttgataaagttaacgctttgaatactgaagtgaaagcgcaagaaacacttcgtccaactaaaggaattcatttagttgttgatagcagtcgcttatcagtgccacaaccaacttattttgattcaggtctccatgatggtcgcatgattttcgttgtgccacgcgaaggcaaaacatacttcggaacaacggatacagattacacaggcgactataaacacccacgtgttgaacaaaccgacgttgattacttattaaaggctatcaataaccgttatcctagcgttgatatcgcattaaacgatattgaagcaagctgggctggtttacgaccattaatctcaaacaacggtagttctgattataatggcggtggcgctaatagtggtaaggtttcagaagaatcattcaataacctaattaagactgttgatgactatgaaaataaaacagctgctcgtgctgatgttgaaaaagcaatcagccaattaagaacagcccatgctgaagaaacggttaacccttcacaagtctcacgtgggagttcacttaaagtggctgaaaacggcttgatgactttatcaggtggtaagattacggattaccgtaagatggctgctggcgcattagaaatgattcgtgatatcttgaagaaagacttcaacgaaacggttcgtgaaatcgattctaagaagttacaagtatcaggtggtcattttgatcctaataacgttgaagaaacattgaagttctacacgaaagtagcgatgagcaagggtatttcagaagatgatgctactgacttagctaatcgctttggttcaaacgttagccgtgtagtttcatatgcagatcaaggcacagctgatggcttgaacttgaaggaaacgattagtttgagatattcagttaacgaagaaatgacgttaacaccagttgattatttattgcgtcggacaaacttcgtcttattccacaatgatcaattggcagccatcaaacaaccagttatcaacgaaatggcccgtctcttgaactgggatgctgctgaaaaagaacgtcaaacagcgcaattagatgccgcaattgctgaagcacaactcgactatttaaaatagtgagttgaataaggaggaaaccttatggataattcaataatggtccaagcactaggcgaattagtcggtacatttatcttagtcctcttaggggacggagtcgttgccggtgttagtttagcaaagactaaggccaacggtgctggttggattgcaattacgttaggttgggggtttgccgtaacactaggtgtttacgcatcagcatttatgggtcctgcccatttaaacccagcggtcacgctcgcctttgcaatcatcggtaaagtatcatggtctgttgtattaccatttatcattgcccaaatgattggggctttcttgggggcagtcgttgtctggattcaatactacccacattggcaagcgacagatgaccaatcagcgattttagggacttttgcaaccggtcctgcaattagaagcccatttgccaacttaatgagtgaaattattgggacatttgtcttagtattcgcattgttagcattgacacggggccaattcacagaaggcttaaacccactcgtagttggtgttatcattactgcaatcgggttatcacttggtggaacaactgggtatgcaattaatccggctcgggatctaggcccacggattgcgcatgcagttctaccaattgccaacaagggtgattctgactggcaatacagttggattccagttatcggcccattcgttggtgggattttaggggcattattgtttgtcctgttaccataataaacgcctttaaaaagagtgactcattcattaatgagtcactcttttttgttcgtcttttcaaataactaatatttcatgaaagatattgattaattattttacacgtaatacgtacaatttataaaactataataaaataatacggatttccctttgacttatgccgtcgtcgttgttaaaatcaaaccataatcaattaagaaagcaggctaatcgaatgactgatatagcgattgtgatgggatcgatctctgattgggaaacaatgcaggaaacggctcagattttaacggatttgaatgtgagttataccaaaaaagtcatttcggcacaccggatgccaattgaaatgattgcttttgcgcaaagtgcggcggaagaaggttatcaagtgattattgcaggtgccggtggtgcagcacatctaccggggatgttggctgctaacactgttctgcccgttatcggggtaccaattcaaagcaaggcgctcaatgggatggactcattgttgtcaattgtccagatgccaagtggtgtgccggtggcaacggtagcgattggtaaggcaggcgcaattaacgctggtttgttggcaacccaaatctgcgggcttaaaacaccaacttatcaaaaggcattagtgcaatacaaacaagcacttcatcaaaaggcggtggcaagtaatgaccaacttaactaaacaaattttaccaggacaagtcattgggattattggtggcggtcaattaggacagatgatgaccttggccgctaagtcgatgggctttaaagtcatcgttcttgatccgcaagttgattgtccggccggtcaagtggccgatgaccaaattgttgcggcttacgatgacgagaatcaaatcattgaattggcgaaacgttcggatgtcgtgacttatgaatttgaaaacgttgatgcaacgacgattgaaaaagcacaacaattaacacaaattccacaaggaaccaaggcgttacggattgcacaagatcgtgttttggaaaaacaattcttagcaaccgagaaattaccgcacgccgcttttaaagtcgtaacatcgattagtgaattaactaaagcggtcgctgagattggcttaccctgtctcttgaaaaccgcccggggtgggtacgacggtaaagggcaacttgtcttaagacggcccagtgatattgaagccgctagagcacttctggattttggcatttgtgtgttagaagaaatggtgacttttgatcaagagatttcagtcatgattagccagaattgggcagggcaacaggcacttttcccagtcattgaaaaccaacaccggcataacatattacatattagtatttgccccgcacgggtaccggcggcggttgcacaagaagctaaggaaattgctcagaaaattgcgaccgaaatagaattggtggggacactcggggtagagttcttcgtgaccccaactggccagttgtttgtaaatgaaatcgcaccaagaccgcataattcgggtcatttaacgattgaagcctgtgacttgtcgcaatttatggcgcacatccggggggtttgcaattggccacttcaaacgccgcgcctttggcaatcagctgtaatggtcaatgccttgggccaagatgtaccaggtgcactggctaagagctgccagtcaactgattggtcttatcacgattacggtaaggctgagcgcaaagaaaatcggaagatggggcatatcaccctgttgactgatgatctaaacaaaacactttctgaaattgaagcaacacaaatttgggcattaccaaaggagcagacaaaatgattgaacgttatacaaatcctgaaatgggtgccatttggaccgatcacaacaagtatgaagcatggttagcagttgaaattttagcggatgaggcgtggtctaaattagggcatattccggcagaagatgtcgctaagattaaagccaacgcgcaattttcaattcctcgcattctagaaattgaacaggaaacaagacatgatgtggtggcgttcacccgggccgtttctgaatcactaggtgctgaacgaaaatgggttcattatgggttaacgtctactgatgtcgttgatacggcttacggctatttattgaaacaagcgaacgccattttacgagctgatatcaacgctttgatagaagtgattggtaagcaagctaaacgttatcaagatacagttatgatggggcggacacatggtgtgcacgctgaaccgacgacttttggtttgaaattagcgctttggtattccgaattaaaacgccataaagaacgttttgaaacagcggcagaaggcgttgaagccggtaaaatcagtggggctgtggggacgtttgcgaatattccaccgtttgttgaaagttatgtttgtgatcaattggggattcgggctcaagaaatttcaactcaagtactaccgagagatttacatgctgcttacgttgctgaaatggcgttattagcgacatctatcgagaaattcgcgactgaaattcgtggtttacaaaaatcagaaacgcgcgaagtggaagaatactttgctaaagggcaaaaaggctcttcagcaatgccccataaacgcaatccaattggttctgaaaatatcacaggcttaacgcgggttattcgcggtcatatggtaacggcttatgaagatgtagcgctgtggcatgaacgcgatatttcacatagctccgctgaacggattattttaccggatacaaccattttattagattacattctcaaacggtttacaaaaattatgacgaacttgacggtcttcccagaaaatatgaaacgtaatatgggtcggacttttggtttgatttatagccaacgcgtgttattgaaattgatcgatcacggcctttcaagagaagcggcctatgatttgattcaacctaagacggcctgttcttgggatgaacaaattgatttcagaccgttattagaagccgacgaacaggtaatgagcattctaacgccagctgatttggatgatgcgtttgactatcattatcatattcggcatgtggccgaaatttttgagcgtgttggtttgggttaaaaataaacgaactttgaaatagcgatcatttcaaagtttttttatggcaaaaataaaaacgaacaattattaattattttataaaataatatgtctattggaggaagaaatgatgagtgaaacgttactttattcagggaaagccaaggacttattctcaactgacgaccccgaagtcttaaaaatgatttataaggatcaagcaactgctttaaatggcaagcggaaagaacagattactggcaaaggggaagttaattatgaaatttcaaaattaatttttgcttacttaagtcaacaagggatcgaaacccatttaatcaaaaatgtatctgaaaccgaacaactcgtcaaaaaagtcaccattatcccgttggaagtggtcttgagaaatgtggtcgccggaagctttgcacggaagtttggtcaaccgttgggacaacgattagaacaaccgattattgaatattattacaaaaatgatgctttggacgatccggctattaatatctcgcaagcaacggctttgaaactggtgacacctacggaagtggctacgattgaagcgatgacgaaacagattaatactttgttgattaagttattcaatgaaattggtattgatttaattgattttaaattggaatttggtcgctatcaaggacgcttaattttagcggatgaattttcaccagataattgtcggctttgggatcagaaaacacactcatcattagataaggatgttttccgccagaataagggcgacttagtcacggtctacgagacggttttacaacgcttaacaaaaatgattgggggttttgcaaatgtataacgtgcaagtttatgtcacctataaagattcagttctagatccacaaggtcaagcggttcaaggtgcgattcaacgcttaggttttgaagggatcagtcaaatgcgaattggtaagtttttcgaaatgcaagtgactggtacggatcaagccactgtgattgagaaagttgaagcaatttgcgatcgactattggctaatccgaatatggaacaataccgctacgacgtacaattggtggaggatgcaaaatgaaattcgcagtgcttgtttttccaggatcgaattgtgatgccgatttataccacgcaattgtcgatgtctgccatgaagaagcggcttatgtctcttacacagcaactagcttagccggttttgatgcggtgctaattccaggtggcttttcatatggcgattatttacgcagtggcgcgattgctaaattggcaccaattatgacggcggtggtggcttttgctaaagcgggcaaaccggttttaggaatctgcaacgggttccagattttgacggaagcaggcttattaccaggggcgctgttgcccaatcgccaaacgcatttcatttgcgaaacggtaactttacaggttgaaaataacgacacacgctttacaaatcaatatgcaaaaggggccacaattgcgctaccgattgcccatggtgaaggtaattattattgtgatccagaaacgttggcccaattgcacgccaaccaccaaatcgcatttacttatacaaccgacgttaatggtagtttagacaatatcgcgggcatcacgaacgaagcgggaaacgttttagggatgatgccacaccctgaacgtgcagtcgaagttttattgggcagtgcggatgggctgggggtcttccaatcaattttgacaactttgaaaagcggggtagtaactcatggtgaataatccaacggcaattgagattcaacaaaccaagttataccaacaatggggcttaaccgatagtgaatacgaattgatttgcactaaaattttaaaacgattgccaaattacacagagacgggtcttttctcggttatgtggagtgaacattgttcgtataaaaactccaagccgattcttaaaaaatttccaacgaatggcccacacgtgctacaaggaccaggtgagggggccggtattttagatattggtgatggtcaagccgttgttttcaaggctgaaagtcacaatcatccctctgctgttgaaccctatgagggggcagctactggtgtcggtgggattatccgcgatatcttttcaatgggtgcaacgccgattgccattttagacagcttgcggtttggggagctcaatgataatcaaaccaagtatctggtccaggaagtggtcgctgggattggcggttatggtaattgtattgggattccaacagttggcggtgaaatcagttttgatccgtgctatcaagccaatccattggtgaatgcgatgtgtgtcggtttgattgaacaaaaggatattcaacaaggaaaagcgcgaggagccggcaatagcgtgttgtacgttggcgccaaaactggacgtgatgggattcacggggccacctttgcatcggatgaatttgctgaaggtaaagcaacgcaacgctcagccgttcaagtcggtgatccattcatggaaaaattattgatggatgcttgcttagaattaattttgcaacattcggattggttggtcgggattcaagatatgggggcagctggattggtttcatcaactgccgaaatggcggctaaagcgggaaccgggatgattttagaccttgatcaagtgccgcaacgcgaaaccgacatgtctgcttatgaaatcatgttatccgaatcgcaagaacgaatggctttatgtgttagagctggttatgaagaccaagtgattgctttatttaaaggttacgacttagatgccgttcggattggggaagtaacaaccaaagaacaataccaactatggcaccaaggccaattggttgctgatttaccagtggcggccttaacagatgccgcaccggtttatcataaggaccaagcaaaaccagaacgcttagcaacatttgccgcccaagcgccctatgtgcctagcgtgacggacactcaggcaacttggttggcactattaaaacaaccaacaatcgcggataaaagttcattctaccgccactatgatgcccaagtgaaaaccaataccgtcgttttacctggtagtgatgcagccgtagtgcgcattcgtggcaccaaaaaggcccttgcgatgacgactgactgtaacggtcgctatctttatctagatccccacgtgggtggccaaattgcagtcgctgaagcagctcgaaatattgtcgctgctggtgggcaaccattagggattacggattgtttaaactacggtaatccggaaaaaccagctgttttctgggaatttgatcagagtgctcagggaattgctgctgcttgtgaaacttttggtacaccagtgatttcggggaatgtctcactgtataacgaatttaacggagaagcgatttaccccacaccaatgattgggatggtcggtttaattcgagatatccaagacattactacgcaagatttcaaacaagttgatgatttaatttatttgattggtgaaactgacgataactatgcaggtagtgaattacaaaagatgcaacaaggtactatttcaggtcaactgggacatttctcattagcaacggaaaaggctaatcaagatcttgttttaaaagccattcaacaaggcttgattactagcgcgcatgatctatcagaagggggcttagcggtcgcgctttctgaagcaaccttcaaacaaggtttggggtatcacgtacaagtagatttggctagtcgccaattatttgccgaaacacaatcgcggtttattgtgacggttaaagcggccgatcaagctgcttttgaacagattagcgaccagtcagcccaattgattggtcgggtaacggctgaaccaataatgcatattcaaacgaaagatgaaatgattgacttgaccgttgaagcggccaaggatgcttgggaggcggctttaccatgcttaatgaaatcagaagcttaaatgaagaatgtggtgtctttggggtttggggccatccagatgccaaccaattggcctattttggccttcatagtctccaacaccgggggcaagaaggggcgggaatcgtcacgaatgacaacggtcagttactaggttatcgcgatcgcggtctattagccgatgttttccggaacccagaaaatttagcccaattaacaggtgaagcggctatcggtcatgttcgatacgcaacggcggggagtcacggtttagaaaatattcaacccttcttgtttgattttgccgatggtcaatttgcgttagcacataacggcaatttaaccaacgcggtcacgttacggcgtcaattggaagatgagggcgccattttaaagtctagttctgattcagaaattttaatgcatctcattcggcgagcggctggtccggatttgcacactaaggttaaaacagccctcaaccaaattcacggtggttttgcctatgtgctattaacgcaggattccttgattgcgatgcttgatcctaatggtttccgaccattatcgattggacagatggccaatggggcgtatgttgttgccagtgaaacgtgtgcgctaaacgcggtcgaagcgatttttattcgggatgtacaacctggtgaagtcgtgacaattgatcgcgatggcttgcattcggatttcttcacgaccgaaacgactcattcgatttgttcgatggaatatatctatttcgcacgaccagattctgatatttgtgggattaacgtccacgcagcgcggaagcgaatgggcaaacgattggcggcggaaacgggtgttgatgctgatatggtgattggggtacctaactcatcgctctccgcagccagtggttacgcggaagccagcggcctaccatatgaaatggggctcgttaaaaatcaatatgtcggtcggacctttattcaaccgacacaagcactgcgagagcagggtgttaaccgcaagttagcagttgttaaaagtgtcgtggcaggtaaacgaattgtgttagttgatgattcgattgttcgtgggactactagtaaacacattgttaaacggttgaaggaagctggggcgctagaagtgcatttacgtgtcgcctcaccaccattaaaatatccttgtttctacggcattgacattcaaactcgcgaagaattaatcgcttcacaacaaagtgtggctcaaatgtgtgaaacaatcggtgctgattcgttggcctttttgagtcaagaaggtttgattgatgcgattggcttacatcaagatgcaccgtattcagggttatgtatggcgtattttaacggcgattatccaacgccgctatacgattatgaagcagattatcaagcgagtctaaaacaagataaggagtaatcgagatgacagatgcttaccaaaaagcgggcgtcgatgtgacggctggttacgaagtcgttgcccgcatccaaaaaaaagtaggggctgataatcacaatattggcagctttggcggacaatacgcgctagaaatggcccagtatcaaaaaccggtgttagtctcgagtacggatggtgtcggtacgaaattgatggttgcttttgcagctgatcaacatgcgactatcgggattgattgtgtggcgatgtgtgttaacgacattgttgcacaaggtgcgcaaccgttatacttcttagactatttagcaactggtaaaactgatccggataagattgaagacatcgtcgctggtgtgctcgaaggttgcaagcaagccaatatggctttaattggcggtgaaacggcagaaatgcctggtatgtatgcggctaagcactatgacgttgccggttttgcagttgggattgctgaacaggatgcgttagtgaccggtgaaacgattcaggccggcgacgttctgattggattggcgtctagtggcattcattctaacggttattcattagtccgcaaaatcttttttgagcaaaataatttgacagttgctagtcaattgccagagttaccgggtaagacactgggtgattggttattaacacctactaagatttacgttgaagacttacagccgctactgcaacaacgggtgattaaaggcgccgcacatattacgggtggtggttttattgaaaacgtaccgcggatgttaccggctgatttagcggcccacttaacgttgggcagttggccaatcctaccgatttttaaggccttacaacaatatgggcaacttgctgaaatggaaatgtataacatcttcaatatggggattggaatggtcttggcggttgcaccagaagcagcaccagccgttttagcacaattgaatgctaaacaggaacaagcttatcagattgggaccgttcaaaaacgtcaacaagcggtggttgaattggtgacagccaaatgagagtggcaatttttgcatctggcacagggagtaacttcgaagcaattgctgataatcaacgcttacaacaagcgggccttgaaattgtccaattggtttgcgatcgcccgcaagcagccgtgattgaaaaggcgcaccggcgggaggtgccggtgactgtattggcaccacgtcagtttgaaaatcgtcaagcttacgagcaagcagtcgttgcccagttggcgcctttggcgatcgattatattatcttggcgggctacatgcgaattatcacgcccgttttactaggcacttatcctcagcggattattaatatccacccggcattgttaccggattttccggggattcatgggattgaagatgcgtaccgtgccaaagtgagtgaaactggcgtgacggtccactatatcgatgaaggagtggatacggggccgattatcgcccaagcaaccgttccggtgaaaccaaatgatacgctagcaacactagaagcgcgtgttcacgcggttgaacatcaattatatccagctgtaatttatgatttagttcaaaaaaataattaaagggagcttttaacacatgaaaagagcattgattagcgtttcagacaaaacgggtattgtggcatttgcccaaggattagtagcggcagattttgaaattatttcaactggcggcacttttagcgtcttggaaaaagcgggtgtgccagtgacacccatcgatgaagtgactcattttcctgaaatgttagacggtcgggttaaaactctccatcccaatattcacggtggcttattggctaagcgcgatgaaccaacgcatatggcagcacttgctgaacacgagattgcaccgattgatctggtttgtgttaacctctatccctttaaagaaacgattcaaaaaccagagattacccaagaacaagcgattgaacaaattgatattggtggcccatcgatgttacgttcagccgctaaaaactttaagtcagtgtacgtcgtggtggatcaagccgactatgacgaaacattggcacaattgcaacaagatgatgtcacttaccgccgccatttagccgctaaagcattccggcacaccgccgcctatgatagtttgattgccggttatctgtcagatgctgatgcggttgaattccctgaaaaactttccttaacatacgacttcaaacaagcgttacgttacggcgaaaacgctcatcaaaaagctgccttttaccaaagtgctttaccaagcgccttttcgattgctgctgcccatcaattacacggaaaagaattgtcttacaacaatattaaggatgcagatgcagcgattaaagtcgctgcagaattcagcgaaccatgcgtggtggcgatgaaacacatgaatccttgtggcgttggtttggggacaaccatctacgatgcttggcaaaaagcttttgcagccgattccgtctcaatttttggcggcatcattgccttgaaccgcgaagtagacgttcaaacagccaatgctttgcatgaattattcttggaaattgtcattgccccaagttttgcgccagaagcgttagcaattcttgaaaagaaaaagaatattcgtttgatgacacttgattttgaacaagccgctaaagcggatcgtttcgaaacagtttcggtcttaggtggtctattggttcaagaaagagatcgcttaacggatcaagcatctgaattgaagacggtcaccactaaagccccaactgaagatgaaaaagaagcgctcctatttgcgcaacgcgtggtgaaacacgtcaaaagtaacgcgattgttgtcgcaactaaagatcaaacgttgggcgttggtgccggtcagatgaaccgggttggctccgttaaaattgcgttggaacaagcattagctaatgggatgcaagcaccattcgtgttagcatcagatgcctttttcccaatggacgatagcgtagcctacgctgctgaacacggcattacagcgattattcaacctggtggatcaattaaagatcaagattcaatcgacatggcgaaccaaaaaggggtcagcatggtctttacaaatcgacgtcattttaaacattaagaggtggcatttaaatggatatcttggtgattggcagcggtgcgcgtgagcatacgttggcacgagaactactaaaaagtgaacaagttgaacaggtctattgcttacctgggaatcccgggatgcaattagaccagataaaaacggccgcaattgacgtcaatgattttgagcagttaattgcgtttgctaaaaaacaggcggtggcttacaccatcgttggcccagaacaaccattagtcgctggggttgtggatgcttttcaagcggcgggtttagcgatttttggctcgacgaagcaggctgcggcattggagggctcaaaaacttttgccaaagaaatgatggctcgagcacaggtgcccactgcccaatatcaaacggtaactaatgaatcagaggcgttaaccgccttgcaagggcgttcgttaccaatagtgattaaggccgatggtttagcggctggtaagggtgtggtcatcgctgaaacattggcggatggcttagcggccgttcggcggttcttcaaacaaggacgtcgtcagatcctcatcgaagactatttgatcggtgaggagttctcgctaatggcgctagtggctgatgatcaagtttatccgttgccgattgcccaggaccataagcgggcttttgaaggtgaccggggaccgaatactggtgggatgggcgcctattgtccagtaccgcaaattagtgatcaaatagtacaaacagcggttgaaacgattatcaaaccagttgtggcaacgatggccgctaatggcacgccgtttaccggcgttttatatgcggggttgattgcgaccgcaactgggatcaaagtaattgagttcaacgtacgctttggcgatccggaaacccaagtagtgctaccgcgtttgcaaggtgatttagcgcaagtctttcaacaattattaacccaccagcaaccgactttggactggcaaacagacggtgtgacgttgggggttgtagtggccgctaaaggttatcccagtcaagcgccggcaatttttcagttggcaccaactgctcgttttaaagcggctaatagtcagtttagctttgccggtgtggcaccaacaaccgggggcttaatgagtgctggtgggcgtttatatacggccgtttatacggcacccacaatggcgcaagcgcgggtccaaattgaagctgacttacaatcggtggccaatccacaaagctttttccgccgagacattggttttaaaagtcaaatgtaagaaagcgagtacaaatgtttgctaatcactatgtaagtgctatatcatgatcctattgacaaaaagaaagaggcaattattatgacatatcatacaagtgacgcagaacacccaattgatgttttaaacctagcatcgctagagggtcgtgtgaaggaacgaatggaagccggtgcttttggctatattcgtggcggttcagaagatgaatggacaatggctgaaaataccagtgccttcaatcaaaagaagattatgccccgtgttttacaagggttgaacatgctgatttgcacacaaaattgtgggatattgatttgaagacgccgattatccaagccccttcagccgcacaaggcttagcccatgaaaaaggtgaagtggatactgccaaaggaatggccacagctggttcaattttctcgattagtacgtatgctaatacactcgttgaagatgcagccgcagctgcgcctgatgcaccacaattcttccaactttatatgagcaaagacgatcaatttaatgaattcttactgcaaaaggcagttaaagcaggcgttaaagcgattattttaacggtggattcaacgttaggcggttatcgtgaagcggatattcaaacaaaattccaattcccattaccaatgcctaatttagcagcttacagtaactcggatggtgctggcaaaggcatttcagaaatctatgcggctgctaaacaaggcattgtcccagaagatattcaaaagattaaggaaatcacacacttacccgtcatcgttaaaggaattcaatcaccggttgatgctgaattagccatccaagcaggtgctgatggtatttgggtgtcaaatcatggcggccgtcaattagacggtgggcctgcttcttttgaagtgttaccattagtggcgcaacaagttgctaaacgggtgccaatcatctttgatagtggtgttcgtcgtggtgaacacgtctttaaagcacttgctagcggggctgatttggtcgcgattggtcgcccaattatctatggattgaacttagggggcgcacaaggcgttacctctgtgattgatcatttgaaccatgaattgtcaatcacaatgcaattggcaggcaccaagacaatcgatgccgtcaaagaaacaacattgcttgattaatttggattcaaaagcgctaggacttttgtctggggcgcttttttggtcaggaaatcttcccttttcttttgaaaaacgatcaatgattattcatatttaaccactaaactagggctatcgtgttaatagaaagcgtggtgtggattatgaataaaatgggcgtgtttatgagtttggttgtgacgtttgtggtcggagtggttgttggctggcaagttttaggaactaaggcagtgacgcaagaaaaattgccaacgacgaccgaaacatcgcaaagtagccaaaccaataacatacaacctgatcaaaatagtgatgaaggcccaacggaaaatcagccgcaaacaagtgagagtcaatcaacggcggatgcaacaacagtttaatccagtggtcattaatgatatactaaaagtccttggcaggggcacaaacagcacaaaaagaggcggacttcaggacaaatgtaaatttgcctgaaagtccgccttttgttgtttaaaattaatgccggttgacagtcggtaagtccgctaagaatagttcgcttgcgactaagccgattaaacttaaaataaagtaaatccagtgggcaccgctcccccaaccaaagaggctagcgtcaatgccgactaaaataatgaaaataagacaattaagcactagtccgattcgaaatgttaattggctagcaactacagcgaataatacgattgaaagaaaaatagtaaagaatgcagaaatcaaaataacgaccacctaacactgtccgatttaagatacttgtttcattctactataagaaatagccgacgacaattaaatttaggtgcgagttggtgaatctaaaagggtccgattaaaaaaagcgtactttaaaagcaaatgctagacagttatcgaaaaaacaggctatactagacgcgaagtagctaaagaatgggggaaccaaaatggttcgtgaaagtaatcctgaaacgaccgacccacgtgttcagcggacaaagcaacaattacgccgagcactagttgaactattaaaagcagcaaccactaaagaaatttcaattcaagcaattactaaacaagcacagattacccgggggactttttacctccattatgaagataaaacggattttattcaaaaagcagtacaagatttaattcgggatttataccaaacagtgacagtccaaaatgataaattggcgcaaccctatcagcaaatcaatttattagcgttatttgaatatgttgaacgccgccaagatgcctttaaagtattccataaaaatgatacgagtttggcttttaaacagcaattaacgaccgaaatgcggcggctaattgaagcctatctcaataatttatttcaagaggcaacccagtctgatcagattgaattgagtatcacagccgattatcttgctggcgcgagtttagtgctcgttttcaagtggattgaagatggtttagtctattcaccacgctacatggctaagatgctttatcaatttgttcagatgccaaatatggcttttaatgtggctggattcttcgttgaagcgtaaatagctattgactcgatcgcaaatatttgatatcatatgaacgttgtaattgtgagctccacagctgcaaccgcgcatactaaggcattaagtactattattagtcaccttagttggcgagtctaagaaaaaataggaggtgcacacatgtacgcaattatcaaaacaggtggcaaacaatataaggtagaagctggtcaagcaatctacgttgaaaagttagccgcagaagctggcgaaaaagtaacttttgatcaagttattttagttggtggtgaaacaactaaggttggtacaccaaacattgatggtgttactgttgatggtactgttgaaaaacaagggcgcgaaaagaaagttgttactttcaaatacaaacctaagaaacacagtcatcaaaagaaggggcatcgtcaaccatatactaaagtgatgatcgacgctatcaacgcttaattgagggaaataagatgattaaggctgactttatcgtcaatgcggattcgcaaattatttcttttcaaattacgggtcatgctgactcgggtccttacgggagtgatatcgtttgtgcagctgtttcagccgtctcaattgggacgattaacagtttgcaaaagctcgctggttttgaaccagaggtagaagcagataacctaaatggtggtttgttaacctgtcaagtgccggcaacggttacgggacaagctttggcaacggcgcagattctcttgcagaatttgcaactgacgctcgaagatattacgcaacaatacgggcagtacattcaagtacaaacaaaacgtaaatagacagttaataaacaggaggtgcatttagatgttacaaatgaatttacaattcttctctcaccataagggtggcggttcaacaactaacggccgtaactctgcaggtcgtcgtttaggttctaaacgtgctgatggccaaactgttacagctggttcaatcctttaccgtcaacgcggtacaaagattcatccaggtgaaaatgttggtcgcggtggcgatgacacattatttgctcttgtcgaaggtgtcgttcgtttcgaacgtttcggtaaaaacaagaagaaagtttctgtttatacagcagaagctaaataatgctttaaaaacactcacatttcgtgagtgttttttatttgcttaagatttgtcaggctgatttgtataaatcggtcataactggtatacttgtaactcaagcaacaaaccattgacaatctaactgtgagtgcggatcgctaacaagaagcgatttagcataactaaagggattggctttggccaatcccttttttacatacaatcagtttaaacgactggaaagacttgcttttaaacctgatttcttgctatgattagggcaatggcatccttttaaaaaagtacggaggaaatattaatgttatcagttaacgattttaaaaacggcttaacaatcgaatttgacaacaacctatggcgagtggttgaattccaacatgttaaacctggtaagggtggcgcttttgtccgctcaaaacttaagaatttaagaaccggcgctaaccaagaaaaaacattccgttcaactgaaaaagttgaaagagcaatcattgatacaaaatcaatgcaatatctttatgcagatggtgacaatcacgtcttcatggatacagatacttatgaacaattagaattaccagcagcacaaattcaagatgaattaaaattcttgaaggaaaacatgcaagtttcaatcatgatgtttgggagcgaaaccttaggggttgaactacctaagacagttgatttggcagttgctgcaacagaacctggtgtgcgtggcgatacatcttcgggtggtacaaaaccagcaacactagaaacaggcttagtggttcaagtaccattcttcattaacgcaggcgatgaattaacaattaatacatcagatagtacttacatttcgcgtgcctaacagcagcgtttaactgctggtaagaatttgttaggagggttattgatggctgaagaaacaaatattgtactagatacgcaagaaaattcattggggaagatccaaatggcacctgaagtggtggaagtcattttaggcattgccgcaagccaaattgaaggcgttcatcagatgcgtggaacaatttcatcatcgattaatgaattatttggtcgttcaaatcatggtaagggtgtcactttaaaagtgattgatggcaaagttaatgcggacgtttatgtctaccttaattatggcgtttctgtccctaaggtggcccttgccatgcaagaagccttgaaggaacagttgttatttatgactgacttagaattagcggaagtcaacgtacatgttgttggcgtcgtaaccgaaaaaacacaaaatattattgatccagatgatttatttaacgatgaaacacctgatctaaatggagaccaatcttaatgcctaattttaatcgacaccaaattcgacaagcagcttttcaagtgctgtttacactcaatgcgaatcaatctttagaattagaggatgcttatcaagccgtcttaacgatggatcaatttgatgctgaagaagtgacaccagttgaagtgcctgcttacttggctttcttagtatcaggtgtaactgaaaatcaagccgctcttgatgcagcattaaccccttatttgaaaaaaggttggcaactttctcggttggcaaaaccagaccttattattttacgattaggtttgtttgaaatgcaaaactcaaccgaagcacctgctaaagtcgctttgaatgaagcacttgaacttgcaaaacaatttacagatgatcaagcaaaaggcttcatcaacggcgttttatctaaattcgttgaagcttagtcataaaatgacaaaataaaagtaaattggttaactagtaaaatacgaacgaaattccttaaaacacgttaaaagtatttttttagcgtgtttttttaggtttaatgatcatttatcaacccaaaacgctaaaaaaatgactacttatgttaaaatggaatcatcaaatatcgatatataggggctgtgaattttggaattactagacggtagagcacttgcaaatgaattgacacacgcacaacaaacagcggttgaaacacttaaagaacaaggtgtaacgcctaaattagtggtcatcatggtcggtgatgatccagcgagtgcgatttatacgcaaagtaagcaaaaaagagcaaccaaaattggaatggcttcagaattgaagcgtctatcagctgaaacgaccgaagctgaattgttggccttggtgaaaacgctgaatgacgatcgcaccgttgatggtattttggtgcaattgccattgccaaaacaaattaatgaagatcatgtcatccaagcaatcgatgccaaaaaagacgttgatggttttagtcccgttaatattgggcaattatggctcaaccaacaaggattagtggcctgcacccctaatgggattatgcgcttattagcggcccacaagattgatgtggctggtaaaaatgttgtgattgtcggtcggagtaatattgtcggccgacctttagcagcgttgatgctcaatgctaacgcaaccgtaacgattgcccacagtcgcacagcaaatctaaaagccttaactaaaacggccgatattttggtagcagccattggtaaaccacactttttcggaattgatgctgtcaaagaaggcgcggttgttatcgatgtcggcattaatcgccttgaagacggttcagtcactggcgacgttgatttcgaagcccttcaaacacacgtcagcgcaatgacgccagtgccacgaggtgtcggaccaatgacgattacgatgttaatggaacaaacgattgaaattgcaaaggaacgtgtcaaacgtggttaaaccaactgattatttaacagtcaccgctttaacgcaatatttgaaagctaaatttgaacgcgatccgtatttggatcgggtttatttgactggtgaaatttccaacttccgcttgcggcccaatgcgcatcaatattttagtttgaaggataataaagctaaaattagtgccattatgtttaagtcggccttcgaaaaagtgaagtttacgccggaagaagggatgaaagtcctcatagtcggccggatttcgctatacgaagcctctggtaactatcaaatctacgttgaacgcatggaacctgatggcttaggtgccctgtatcaagcctacgaacaattaaaggcgaagttagcaaccgaaggcttattcgatgcccctaagcaacctttagtccgtttccctaaaagaattgcggtcattactagtccttccggggcagtgattcgcgacattattacgactacccaacgacgctatccaattgcacagttagtgttgttcccagcagttgttcaaggtgacggtgcggctgatgttttagttgagcggcttaaacaggttaatgaacacggcgactttgatacgattattatcggtcggggtggtggctcgattgaagatctatggccgtttaatgaagaacgtgttgcacgggcgattgtggccagtcagattccggtcatctcatcagtgggtcatgaaaccgatacgacgattgctgatttggtcgcggatgttcgggctgccacaccaactgcggcagccgaattagcaacacccgttttaacggatgaaattttaaaattacaacaacagcgtttacggttatatcaagccttttcaaaaaccgttgcgcttaataaaaaacaactcgatcatttacaaaatagttatgtcttgaaacagcctaaacgtttgtatgatggctatctccaaaatgttgaccaactacaacggcgcttattgactgcacaacagcaactcttaaaggatcggcgccaacaggttcaattgttgcaacaacggttatcggcacaatcaccattgatggcggtgcgacaagcacaaaaagacgttactgaacaacaacgacgtttaaaccaagcgatgaaccgcttgatggctgatcgccggcaaaaggccgcacaagtcattgcagcactcgatttagtcagtccgttgaagattttaggccgcgggttcgcctatgtcacggataatcagcaacaaatgttgaaaaaagtggcagattttaaggcccaacaaccgattgaattacacgttcaagatgggttagtaacagctgaagttgtcgcaacccataaaggagaagaataaaatggcagaaaaaaaattaacgtttgaagaaaatttagcgcaattagaagtgattgttaacgagttggaaacgggcgatgtcccgcttgaaaaagcaatgacggcctttcaagaaggtgtcaaactcagtcaaacacttgaagaaacattgagccaagctgaaaagacaatggctaaagtaatggccgataacggcgaagaagtaccattagatgctgaggagcaacagtaatggctgattttaaacaattagcggcacgtgaattaccgcagtttgacgcttatttaaaaaatgaattggccaaaattcaagaaccaacgctgcaaaaagcgatgacgtactcggtcatgacaggtggtaaacgattacggccactcttattatttgcggtcttagaaagtgccggtcaaagcattgatgaaactgcttttagagcagctggtgcgcttgaattaatccatagttactcgttaatccacgatgatttacctgcaatggacaacgatgatttacggcgcggccaaccgacgaaccataaggtctttggtgaagctgaggctattttggctggtgatgggttattaacacttgcgtttgaatggttagcgacattaaacgtgaccgcagaacaacgaatcgaacttgttcggttgttagcgcaagcggccggtgccaacgggatggttgcggggcaagtcgaagacattgaaggcgagcacaaagcgttgacattagcgcagttgcaacaagttcatcatcttaaaacaggttgtttaattgaagtcgcggtggccatgggcgctgtcttagcgcaacttggtgaggttgaaacaactgctttacgcggttttgcgcaacaatttggtttggcctttcagattcaagatgatatcttagatgtcaccagtaccactgtggaaatgggcaaagctgttcataaagatgccgcagaacaaaagaataccttccccattttattggggttgtccggtgcgcaagaagcacttcacacgacttgccaacaagcacaacaacaactggcgcaagtcacgacttttgaccggactttattaaatagttttttggactatttcaacgaataggagaacagatgaaaaaagaacgggtagacgtactattagtacaacaaggtttatttgaatcacgggaacaaggcaagcgggcaattatggctggggaagtttatgggaaaaatgatgaacgaattgacaagcccggcgaaaaaatcgacgccgaaaccgtattaagagttaaagggcacaaaatcccatacgtgggtcgcggtgctttgaaattggcgaaggccatcgatgtttttgatatcgatcttaaagataaattaacgctggatatcggttcatcaacaggtgggttcaccgatgttgcgttgcgtaatggcgcacggcgctgttatgcgcttgatgtgggttataatcaattggcctggaagttgcgtgaagattcccgcgtagttgttatggaacgggttaacttccgttatagccaaccagaggactttactgatggattaccagactttgcaatgaccgatgtttcctttatttcgttgcataagattttggtacctttaaaaccaattctcaaacctaattgtgatgcggtggctttaattaagccccaatttgaagcgggtccagctaatgtaggtaaaaacgggattgtccgtgatcctaaggttcataaaaatgttgtgacagatatcgtcaactttagtttagcaacaggctacgatgttttaggtcttgatttctcaccaattaaaggtggcgaagggaacatcgagttcttgatccatcttagaaatacagaagccgagacgggcacacttgctgaaaatgtgaatattgatgcggttttagaacgagcttatgcagaattaaaacgaccttctggaaaataatgcataaatctttgtgttttatgtataaatacgctatcatgtgagttagaattgttattcacaagaagaggtgtttttgatgcgtaaagtagaccgacaacgactgttgagaaatttaattcaaactcatgaaattgaacgccaagaagattttgttaaactcttgcaggcggaacaaattgaggtcacgcaggccacgatttcgcgtgatatcaaagaaatgcaactggtaaaagtccctaatacggacgaaggctatcactatagcttaccgcttgaaaaaaaattagatgttaaagaaaaattgcgacggacattacgagatgcctatgtgacccataatcaacaggattattttgtggtgattaaggcgcatcctggtaatgcgccagcaattgcaagtttattagatcaattacaatccgaagatatttttgggacaattggtggcgatgacacggtccttattatttgtaaatctgaggaacaagcaaaacagttcagattatttatcgaagacttgctaaagtaatttagcaagtttttttaagattaggaccagatgaaaggggcattttcaaatgctacaagaattagtcattcacgactttgcaattatagatcaattggccattagtttcgatgaagggatgacggttctttctggtgaaacaggggccgggaaatcgattattatcgacgcggttggcctgctcgctggtggtcgagggtcacaggattttatccgaaccggtgcgaaaaaagcgacgttagagggcttgtttacatcacccgaaaacgccacgactgccgcgcttttagctgaatatgggattgaacacgatgatcaaaccattttattacaacgtgatttggcattaaacgggcataatgtttgccgtgttaatggccatctggtcaacactgcgacgcttaaaaagattggagaaacattagttgatattcacggtcaaaacgaacatcaagaattaatgtatcctgatcgccatctaggcttgttggatgagtttgcccacacagctttggcgagtgcaaaggcggcctatcaagaaacctatcaggcttaccggcaaacggaaaaagcattgaagaagaagcaacaaaatgagcaggaatgggcccaacgccttgatatgcttaaatttcaaactaatgaaattgacgcagcgcaattacaaccagatgaagaaagtaagttaatcgaagaacgcgcgaaactcagcaacttccaacgaattaatcaggccttgcaagctagtcgcgccattttatctggtgaagaaggcaacgcgctagatcaaatcgcgattgcgatgaatcagatgcaagaaattgcggaattagatcctgaattcaaaagaattgctgataatctacaaacaggctattacacactgcaagacagcggtagtgatattagtcgggaagtcgataatcttgaatgggacgaagcacgcttggatgaaattgaacagcgcttagaaacaatcaataatctcgaacataaatatggcgattcaattcctgaaatcttagcttatggggcgcaaattaccaaagaattgcaagcaatgcaggccaccgaagccaatgcaagcgaattagagcaacaatttgaacaacaacaagcccaattgctggaagaagcagccgttctttctgagaaacgccaagctgctgctcaacagttggaaaaggctgttcaccaacaactcaaagcgctctacatggctaaaacggttttcaaagttgaatttgccatggttgataatcagcaatttatgcgcagcggtcgggataaagttgaattttatattcaacctaatccgggtgagaagctacggccgcttgccaagactgcttctggtggggaattatcccgattgatgttggcgcttaaaacgattttctcagaatcacaaggcgttaccagcattattttcgatgaagttgatactggggtcagtgggcgtgttgcacaggcaatcgccaataaaattagcgaaattgcccaacattcacaagtcctctgtattacgcatttgccacaagtagcggcgatgagtgatcatcaataccaaattcaaaaacaaattaaacaaaaccgcacagaaacatcaatccaaaaggtaaccggtaaaaaacgcgttgctgaactggctcgtatgttggcggggacagaagtgacggaattaacgctagaacacgcccaagaattagtggacctcgcagaaactgctaaagcacagattagacaagcttaataaagaaggggttaggacttgttgtcctaaccccttctttaacggtcatcgtctattgttagttattttttgagatgtagcggatttgatttaaagtaacgattttataaagattagagtgattttcttttaacaagtaagtttgttcgtcgagttgcttaatcaagcgcccattgacttgttcgatgtgctcggccacgttaaattggatagccaaacggtaatggcaatcaaaagcttgcatcatataaagttgaatttggctaggttgcatctggggttgtttgattaattcttgggcatcatcgagttcgaaaaagcgttgataccgtttcaccaattcatgactaaagccgactactgctgattgtttgatttccataacgtgttgtcctccgaacatttgtttgtatttctattatacgaacaaacgttctaatctgcaagcgcaaatttaaatttttttcgtgtataatagattaaacgatgagaaagggtgattttatgagtgatatcaactacaaaattatggctgaaattggggtcattagtgaagataaggcgggctggaagaaagaattgaacttaattgcttggaatggtcgcgcacctaagtttgatttacgggactgggcacccgatcatgcgaagatgggcaagggcatcacgctcaccaatgaggaagttgcacaattgcaaacaatattaaatgagatgaacctaaagtagacttgtaattggcagtcatctagtgataaaatagaacttaactattttataaaagaagagggaattacgtagatgtccaatcgaggaatgttgatcgttttatctggcccatcaggggttggtaaaggaactgtccgtcaagcaatgctagaagatgaatttcgtgattttcactattcagtttcgatgacgactagaaagccaagaccaggcgaacaagatggtgttgactactattttgtgagcaaagaagaattcgagcaagaaattgcaaatgatggtatgctagagtatgcacagtatgttgataattattacggcacaccgatgaagtatgtcaatcaaaccttagaatcaggccgcgatgtcttattagaaatcgaagtccaaggtgcgatgcaggttcgtgagaagtgtccagatggcgtgtttatctttttaacaccgcctgatttattggaattacgtaatcgaatccaaaaacgtggcactgacgatcaagcaacgattgataagcgcatgcaaaaagcagccgatgaaattcggatgatggaaaattatgattacgctgttgtcaatgatgaaattccaaacgccgttcaacggattgaaaagattattgagagtgaacacttacgagtaccacgtgtgattgatcaatataagaaaatgataggggaataataaaatgattgtatatccttcaattgataagttactagaaaatgttaactcacgctattcattagccgttttagcaagcaagcgagcacatcaaatcgaagctggcgatttgaaaatgttatcagaatacaaatcacctaaaaccgtagggatggcaatggaagaaattgctgctggcaatgtaaccattgatcctgattcattgatgcttgaaaaagatgctgaaaaaatggataagctttctcaaaaagatggcgaataagaataattagcgaaccgcatttttagtttattcatcgtgggatgtctaaattaagaggcggtttttttatttaaaggaggtttttaaaatggtgagtttagaaaacaaacacgttacggtttacgtaaccggtgggattgcggtgtacaaggtcgctagtttagtgcgtcagttgattaaaaatggggcaattgtccgcgtggcaatgacgcaggctgccaccgaatttgtgacaccattgacctttgcgacattaacgcggcaagaagtgctaactgatttaatgacgatgaatcacccagaacaagtcgcccacattcacttagctgactggaccgaattggcaattgttgcacctgcgacggccaatattgttggcaaattagcgaacggcattgcagatgatttcgcgaccacggcacttttggcaactacggcgcctaaattattggtgcccgctatgaatgaacatatgtggttaaatcctgcaacacaacgcaatttaacacaattaaaagcagatgggattgcgattgtgcaacccgctactggttttttagcggaaggctatgaaggccaagggcgttttccagaagaagatgtgattatgagcaatgtttaccgccaattaacccctaatcgtttgcaagataaagtggttttagtgacggccggtgggacgcaggaacctttggatccggttcgctatattggcaaccggtcatctggtaaaatggggtatgcgattgctggaatggcggctcaaatgggtgcgaaggttactttgattagtacgcggccagaactggctgtccctgctaatctggcacaagtcatctatgtccgaacggcagccgaactgcaaggggccgttgctagtctatataatgaagcggatgtcgtgattatggcagccgctgtcgctgattttaaaccggcgcaatacgtttcacaaaaaattaaaaaacaagttggtcaaactgatatgacgcttgaactcaatcggacgccggatattttagcgacgttgggtcaagaaaagaaaaagcaatatctagtgggctttgcagctgaaaccaatgatttgatggcgcatgcgcaagtcaaattaacggctaaacaggtcgatttattagtggccaatgatgtcagccaaaccgaccggggctttggcgctgaccaaaatgcggtcactcttttacgaccaaatcaggcaccagaagcattaccattggcttccaaaaaagtgattgccacacaaattttagaacggatcagtacagcgcttagctcaaaggaggaatagcatgccacagattgctaaagtaatcgttgatgtgccgacaatgcaaactaatcggccatatgattatcaggtaccggtcactttagttgatgtcattcaacctgggatgcgggttattattccgtttggaaatggcgatcgtaagattcagggctttgtcttgcaagttttagaccagccaagctttacgggccaattaaaggcaatcgaggcagttgttgatttaacgccagcggttaaccctgaattactatcactttcggattggttagcacaacagacgtatgcttttcagatcacgtgtctgcagacgatgttacccagtgtgatgcgggctaaatatacgaaaactgcgacgttaactgatgaaattccaacggacttacaggccagtctgttcaatggcaatgatgagttgacttttgatcagaatctggcgcctgataagttaaaacaactcatgcaattgcaacgccaaggtaaaattagcgtcacttatcacgttgacaaccgggcacaagttaagcaattaacggcgattgagcccgcactgagttttgaacaattggaagaagcacggatgggtttacgaaagtcagcccagaagcaaagccaattaatcagttatctgcaaacgctgattgatcaagaggcaccgactttattaaaaacgattttagaaaaaacaacttttacgcgggaaaatattcgaatcggtgcggaaaaaggctggttacgccaagttaaggtggaagcttaccggaatccgtacgctaatgctgttcaaccaacccacaaaatgacgctaacgagcgaacaagaaaccgcagttgatgcggtcgttcaatccgcatcaacggatgcctcagaagtattcttaattgaaggtgtcactggcagtgggaagaccgaagtttatttacaaacaattgatgccgtcttgcaacaagggaagaccgcactgatgttagttcctgaaattgccttgacgccgcagatggtgcaacgcgtgaagggccgctttggtgatttagtcgctgtgttacatagtggcttgtctgaaggcgaaaaatacgacgaatggcggcgcatagaacgcaaagaagcgcgcgtggtcgtcggtgcccgctcagccgtttttgcgccacttgaagatatcggcgtgattattatggacgaagaacatgaagccagttataagcaagacgaaagtccccgttatcatgcacgcgacgttgcgatttggcggagtcagtatcataattgcccggtcattttaggtagcgccacaccatcgttagaatcccgggctcgggcgcaaaaagatgtctaccatctgattcgcctgacgcaacgggtgaaccaacaagccttaccagctgttgaactagttgatatgcgcgaagcgatgagggttcaaaaagccagcaacttttcaccggcgttattagccggcatcaaagaacggatgcaaaagggcgaacaaagtgtgttactcctaaatcgtcgcggtttttcatcatttatcatgtgtcgggattgcgggtttgtcttgcagtgtcccaactgtgatatttcgttgacgttacacatggatacgcattcgatgaaatgccattattgtgggcacgaagaagccattcctaagatttgccccagctgtcagagtcgtcaaattcgctattttgggactggcacgcaaaaagtcgaagctgaattacaagaattaatccctgaagcacggatcttgcggatggacgttgatacgactcggaaaaaaggcgcgcatgctaaattattgaaaaaatttggtgatcacgaagctgatatcttattagggacgcagatgattgccaagggcctagatttcccagatgtaacgttagtcggggtgatcaacgctgatactgctttgggtttaccggattttcgggcgagtgagcggactttccaattattaacgcaggttagtggtcgtgcgggtcgtgcagataaggtggggcaagtgattgttcaatcttataatcccgagaattacgcgattcaatttgccaagcagcacgattatgaaggcttttatcaatatgaaatggcggtgcgccaccgtggcggctatccgccttattactttacggtgaaggtgacggttagccaccctgaagaagcacttgccgcaaagaagagttttcaaattgccaaacagatgcgaccgattttatccgaccaagcactgattctcgggcccaccccgaaatcaattgctcggattaataatcgttatttttaccaaattgtgattaaatataaacaggaaccacaacttcaggctaaattagccgaaatactagagaccacccaaatcgatactcgtcacgggtttaagattgggctggataatgaacctctacaatttacttaaaagtgagcgtgattgattaatgacatccatcgtatttatgggaacaccccaattttcagtaccaattttagaagcccttgtggcaaacgactaccaaatcttggcagttgtgacacaaccggatcggaaagtcggtcgtaaacaagtgttgcaacaaacacctgttaaagaagcagcggttcgactagagctaccagtattccaaccagaaaaactcagtggtagccctgaactggctgacgtgattgccttacaaccggatttaattgtaacggcagcttacggtcaattcttaccaacaaaattattagaagccgctaaaatcgctgcgattaatgttcatggctcattattgcctaaataccgtggtggcgctccaattcaatacgccgttttaaatggcgactcagaaatcgggattaccatcatgcacatggctaagaaaatggatgccggtgatatgatcgaacaagctagtattccaattgaagccacagacgataccggtagtttattcgataagttaagctatgttggtcggaatcttttactaaagactttacctgggattattgcacaaacagcccctcggacaccgcaagatgaagcgcaagtgacctttgcgtataacattaccaaggaacaagaacaattagacatcaaccaacctgctgaacagttggttaaccaaattcgcgctttacggcctcaaccaggggcttggttagccgttaatggccaacggactaagatttggcaagcgacagttgcagaaacaacaactgatcaagcagccggcgtagttgtcgcgctaaataaaaaagatttcgaattagcggccggtaacgggactgttttaaaaatcactgaaattcaaccggccggtaaagccaagatgccagtgcaatcttatttaaatggggttggcaagcaactagcagtcggtcaacaagtggtggtgcaagatgccgaataagacaccgcgctacttagctgttgaaatattgacggcaattgccaaacaaaacagttattcaaacttggcattagatcaagtaatcaataagaaccgattaaacccacaagatgctggttttttaacgcagcttgtttacggtgttattcagcatgaatacacgttggattattatttagcacctttcattcaaaagccgaagaaaatggacaactgggttcgccaagttctcagaacagcggtttatcaacaagtttatttggatcgcgtgccagaacacgctattttctacgaagcaactgaaattgctaaaaaaatggggcatgcgggggttgctaagctcgtgacggcgattttgcggcagttacaacgcagtggtttaccggatctcaatgcgattgctgatccaattgaacgtcttagcgtgcaatacagcgtgccgcaatggttggtggcaaaactgcaagctgatttagaggatgataaactcgaatcattgctcgcaacaattaaccaaccagccaacgcttcattgcgagttaatacgcgggtcaatacggttgatgccgtattggctgagttacaaccgcagtttaatgacctccaaccgagtcagattgctaaggttggcttggtcgcacaaggcggtcatttggccagtggtgcgttatttgaagcgggcgattatacgattcaagatgaaagttcaatgttagtcgcacctagtttagacattcaaccaggggaccaagtattagacgcttgtgccgcacctggtggcaagacaacgcatatggcaacttatttggatgcgcaacaaggcggtcaaatcacggccttagacattcatgaccataaagtccgcttgattgaacaaaatgcgaagcggctccatgttgaagatgttgttagcgcccaagcactagacgcacgtaaagtgggcgaacagtttggtgaggcacatttcgataaaattctagtcgatgcaccttgttctggtttagggttaatgcgccgaaaaccagaaattaaatatagccgccaaccagcggacttgattaatctacaacgaattcaattagcaattctagatgccgtggcgcctactttgaaagtcggcggacgcctaacttatagtacatgcacgattgttccggaagaaaatcaacaagtggtggcggccttcgttgctaaccatccggagtttgaaattgaaccagtgccacttgaattaccattagcgcagaatcaagcaagtccttttgtccaaatctatccagatgattaccaaacagacggctttttcatcgcttgtttgaaacgacgggcataactacaattgaggtgattttttatggaagttgcatatcaaacagatgtcggtcaacagcgacagaataatcaagattatgttggtttttatactaatcaacgcggtgttcaatttgcaattgttgccgatggaatgggcggtcatttaggaggcgacgtggcctctgaaatggctgtttcccatatcggacatgaatttgaaaaaacagatgatactgatattgaagcgatggttaagtggttgatttttgaattacaaagagaaaaccaacatattttagccaaagcgaatcaatatgacgatttatcggggatgggcacgaccttagtggcagtcttaatttccgggacgcactatttagtcgctaatatcggcgatagccgcgtttaccgtctcagacgcaatacgttacgtcaattaacggaagaccactcattggtcaatgaactggttaagcaaggggaattaacggcagaagccgctaagcatcatcctcaaaagaatatcatcacgcgcacactgggtgtttctcaagaggttgatgcagatgtgacgatttatgaattcgaaccagatgactacttacttttatgtacagatgggttgaccaatatggtcgatgacgatcaattgcaacaaaccttgatggcagagatgacgctggaagaaaaatgtgccgccttaatccaaaaagcgaacgaagctggcggcatggataacattacggcactcatcttacatcacgaaggtgaggtgcctacgccatgatggaaacagggtacgctgtagcggggcgttataagattattcggcccattggtgaaggcggcatggctaatgtttatttggcgcaggatctaattttagaccggcaagtggcagttaaagttttacgattagatctccgaaatgatccggatacagtccgacggtttacgcgagaagcgttggcaacgactgaattaaatcatccgaatattgttagtatttacgatgttggtgaagaaaacagtatgcagtacatcattatggaatatattaagggcaccgatcttaagaaatatatcgtggaacactttccaattccttatcaacgtgtaattgatattatgacgcagattttatctgcggttcaaaacgcacatgcgcataatattattcatcgggatttaaaaccacaaaatattttggttgatgaagacggcaatgttaagattagtgactttgggattgcgattgcgctcagcgaaacagcgatgactcagaccaacacgttgttggggtctgtgcattatctctcaccggaacaggcaagaggctcgatggcgacgaaacggtctgatatttactcgttaggaattgtgctttatgagttattgacggggatggtgccttttgaaggcgagtccgctgtttcaattgcgattaagcatttccaagatgaagtcccaccagtacgcaactatgatccacgtattccgcaagccctggaaaatgtcgttttaaaagcgactgccaaggatccggatgaacgctatagtggtgttgatgccatgatggctgacttagcaacttctttatcagctagtcgtgcgcacgaacctaaatttgtgccatcaaaagcggatgatttgagtgagactaaggtgattcctgcactagatccagaaggcattacgcaaaccaacaacgatgaggaacaagttaaagaagcagaatcaactcagaaaaaggttaaaaagccagctaagtctaagcgtaagtggtggctactaggtggcggtgttgttttattgctgttattagcaacggtgattgcttttgcagttcaggggagcgaagtaaccgtccctgatttaacggatatgacacaacaaaatgcggaatctgctttgaccgataaaaaactgaaagtcggcacggttcaaaaaacaacgagtcagaaatacagtaagggccacgtcattcgaacaacacctaaagcgggcctgagtgtaaaatcaaaaagtacggttaatttaattgtcagttcaggacgccaaaagtataagattaaagactatacgaaccaagcatatagtgatgttcgggatgctttgaaggataaaggcttgaaagttaaacggaaataccaaagttcatctgaagtgagtcctgggttgattatcgatcaaagtattgcggctggcaaaagggtcgttccaagtaaaacgacgattaccttaacagtcagcagcggcaaacctggttttgcattgcataatctaagcaactatacaaagcaagggattcaagactatgctgcacaaaatggtttaacggtcgtattctctgaagaatattcatcaagtatttctgaaggaatggtaatcagtcaatcgcctgcaagtggtacaatggttcaagaaggtgatagcgtaagcgttatcctttcaaaaggcgagcaaccaactgaacatcattctattgtgacgtcgagttcaaattcagttatcgagtcgagtgcgcctgaatcaagtcaatcgagtgaaagtagcgcgagtgagtcagagagcgaatcagagagtgaatcggaaagcgaatcagcaagtgaatcgatcagtagttcagctagtcaaagtagtcaatcgagcgttcaatcaaagtaatctttagataaaataagttactaccgtattttacgggaggattaagcaattttagtagataaccacagaacaggttaaaaaataatgggaggtgacctattgcagaccggacagattattcgtgccctcagtgggttttatgatgtacaaagtgagcacaaaatttatcgaacacgggctcgaggtaattttagaaaacggaaaattacgccattggtcggcgatttcgttgaatttgaaagtgaaagtcaaacagaaagcggctatatcttagaaattttagaccgcaaaaatgaaatgattcgaccaccagtagcgaatatcgatcaggcagttgtcattgtttcggcagtcgaacctgatttttcgttaaacttattagatcgtttcttgatttatttagaaagtttgaatattcaaggcctcgtttatttgacgaaaaccgatatgatttctgacgaaaaatatcaagagattaagcaatatttggattactatgaaaaagtgggttatccaacttttgcacccagaacggcatttacaccagagattattcaagcgattgaagacacattccctgataaaacgaccgtctttacgggacaaacaggggctggtaaatcaacactgcttaatcacattgatcctaaattgaacttagcaacggctgaaatttcacaaagtttaaaccgtgggaagcatacgacgcgccatatcgaactaattccattgaacgatggattggttggcgatacaccaggattttcatcactgggcattttaaatgtgacgagtgaaactttagtgagtcgttatcctgaatttagagaaattggacaagattgtaagtttagaacttgccaacatgtgatggaacctaaatgtgcggttaaagcggccgttgatgctggtgaaattatgcaaagtcgctatacgaactatttgcaattccgggccgaattaaaggatatccggcctgtttataagaaatcaaaataagaaattggatgggagtttttaaaatgacacaaatcgcaccttcgattttaagcgcagattttatgaatttacaacgggatattcaaaaccttgaggcagcaggtgccgacctattgcatattgatattatggatggcatgtttgtacctaacatgtcttttggcgcccaagtggtcagcggtattcgtccgctaacacaactaggcttagatgttcatttgatggttgaacaaccagaacgctacattgaacaattcataacagctggttctgatttaatcatgattcacgcagaagcaacagaacatctttatcgtggtcttcaaatgatcaaagatgctggtgttaaagctggggtggtcatcaatccagggactccagtgagctacattgaatctgttttaccattggttgatcaagttttagtaatgacggttaatcctggttttggtggtcaaaaattcattccagcaatgttaacgaaggtcgctgaattagcggcttatcgtgaagcacacgctgatgctgattttacaatcgaagttgacggtggtgttaacgaccaaacaatcgcggcctgtgccaaagcgggcgctgatgtctttgtagcgggttcatacacatttgctggtgatttagcaacacgaattgaaacccttaagaaggctgctaatgaagcgcgttaatttattggcaggtggtccagttgatcagtgggcatcggaattagcaacaatcacaacggtcccaggacaatggattacggccgatcgtgggacgttacgcctattgcaacaaggcgtgacacctacgattgcggtcggtgattttgattccattaccccggctgaaaaagaacaggtactagcggcggtcagtgatattcgttcggttcaagctgaaaaagacgaaacagatacgcaattagcgttatcgattgcctttgaagaactacaggctgaccgtgtggtggtctacggtacgactggaggccgaattgaccatttcttagccaatctctttatggcggtcgaagaacgctttagaacggtcctcaatcgcattgagatgcgtgaccggcaaaatacgattcaattctatgcgccagggacgtatgagctgacaaaagaggctgataaaaagtacctcgcgtttatcccgctcgtgccaacgacggatttaaatttagtagatgagaaatatccactcacacattttgatacgacggtcccaatttcgtgggctagcaacgaattcatcggcgaaaaagcgcattttaattttaaaacgggcatcgtagcggtgattcaaagtaaggattaaaagagtgcgtttgaaacggtttgactttgagcattagcacagctcggcgaataactgctgcaagcagttatttgacgagtgacgctaagcacagaagtcagtttcaaaaagcacgtttaagccattaaaattcgaatataaaaaggctcgacaaatttattttgtcgagccttttttgatggaaacgtgcttttgccagtaactttctgcgctttgctacacttgtcaaaccggcgatttcatcgccaattcgccaagttatgcaaatgctcaaaagctaaccactggcaacgcactctatttttgcgcaaaaaaatagattgtccgaagacaatctaagaaacgaaattaaacacgagtaactttgcctgatttcaaagcacgagcagaaacccaaacacgtttaggtttgccatcaactaagatacgtactttttgtaaatttggcttccaagaacgacgagatgcgttcaaagcgtgtgaacgcttgttgccaaatgatgttttacggccggtaataacgtcttttgccatggtctattcctccttttagtaaagccggtagaagaattaacgagaaacataatatgattcagttagtcttaatagttgcatgcatgcacaccggcttacacaattcacttaaacaatttaccataatagttgagctaatgcaagaactcttacaaggaaaattacttgacaggtcattttttaagggtagtatctaataaaagcatgcgttatactaagcaatacaggttcgttaaagtactttgaaagttatcggagctatgctaaaataacattaagtatgtcacaaggaggctattttaatggctgttaaaattaagacccaatacggcgatatcgatattacgaataatgtgattgccactgtcgttggcggtgctgcaactgatatttatggcatcgttggtatggcaagcaagaatcaaattcgtgacaatttaaatgaaattttaaatcgtgaaaattacaatcggggcgttgttgttcgtcaagaagaaaatggcgtggcaatcgacgtttatattatttgtggttatggcattaagatctcagaagtttgccgtaatgttcaaagtaaagtgaaatataatcttgaaacaatgttgggtgttagtgcaaactcagttaatgtttatgttcaaggtatacgtgtattagaagactaaaataatgagcggagctggtggttaaagccagttctatttgttttcgttcgaggaggaacattcgtgaaagttactgaaattacagcaaccgagtttcaagcaatgatgcgtgttgctgcacatcgcttaactaaaaatgcagaatttgtgaattcattaaacgttttcccggtacctgatggggatacaggaactaatatgagtttaacttttcaaagtggtgctaaggcggttaatgaaaataatgcgcaagcagttggtgaattatcaaagagtttagctaagggtctattaatgggtgcccgcggtaactctggtgtgattagttcacaaattttccgtggcttttcaaagagtatggaagaaaaaacaagtttaacggcccaagatttagcagatgcttttacaagtggcgttcaaacagcgtacaaagcagttatgaaacccgttgaagggactattttaacagttgcgcgtgaaggtgctaaagctggtgccaaagtcgctgcacaaacagatgatattggtgcagttgttgaagcggtcgttgaaggttctaagaaggctttattgaagacgcctgaattattacccgtcttaaaagaagtcggcgtcgtcgattctggtggccaaggcttagttttcatatatgaaggtttcttagaaggtttaacaggtcaagcacctgccaaggatctttatacacccgatgaagctgaaatggatgaaatggttaacgctaaccatcaccaaacagcacaaatggggactgaagaaatcgaaaatggttactgtacagaaatcatggttgcacttggcgatggtactactgttgatcgcgaatttgactacgatgaattcagaaatcatttaaatggtattggcgattcattattagtcgttgccgatgatgaagtggttaaagtccatgtgcatacagaacatccaggaacagtgatggcttatggccaacattttggttcattgatgaagatcaaagtggacaacatgcgcttgcaacatgatacaattgttgaaaatgatcaacaagcagcacccgttcaagcggaaccagttgatactgggattattgcgatttcagctggtgctggtgtggcagaactcttcagaagtttaggggccacttatattttaagtggtggtcaaacaatgaatccaagtacgcaagatattttggatgccattcaagcagctaacgcgaagaaagttattttattaccaaataataaaaacatcttcttagcggcggaacaagctgccgaagttgctgaaattccggttgaaattgttcaaagtcggacaatcgcacaagggatgacagctctcttgtcatttgacccttctgcagaattgcaagctaaccaagtagcaatgactgaagcacttgatacggtaattagtggtcaagtgacacaagccattcgcgatacaacgcttgatggtcttgaaattaaaaaagacgattacatggggattatcgacggtaagattaaggtctcaactgctgatcgccaaacagctgccatcgaaatggttcaaaccatgttggatgaagacagtgaaatcgtcacaattatcgttggtgaagacggtgatatgacagaagctgaagcaattagtgatgcaatcatggcccaagacgatgaattggaagttgaaattcacgaaggtgaccaacctgtttatccatatttaatttcagttgaataattaatcaaataaaacaggaatggggctattaaaaatacctgattcctgttttttagtagaagtgtgtttgaaacgttttgactctgaggattaacttaatttggcgaattggtgatgtaatcgctgatttgacaaatgttgttaagcgcaagagtcagtttcaaaaagcacgttaaaaaagaagtgcgttcaaaccggttatcattcgaggactagcctagtccagtgaatgagtgatgaagtcattcgtttgcgggacatagctagccacagaaggatggtttgaaaagcacgtttaagtcatcaaaaaacggaggtgctgtcagtgttaagtttaacggattctgtgactgttttaacgggtgttggcccgaagcgtttgacagccctcaatcaattaggaatcgcaacaatcagtgatctattgtattattttccgtttcgttacgaggatttaaaggttaaggatctctcagaagcggtcgatcaggaaaaggttaccttaaaaggaaccgttgttgctgatccagtcgtcagtcgttggggaccgggtaagacacggctaaacgtccggttattgattaatcatgatgtcattatggtgacttttttcaaccaaccttacttgaaggataaatttgaagccggtgttgatattgctgtttatggtaaatgggatgctagacggaatagtttaaccgggatgaaggttttagcggttcaatcggctgataatccttcgttcgcggcgatttattcaaccaataaaaacgtgcgtcaaggcacgctcgtgaaattgattcgcgaagcatttgataattatcaaagtgtcattccggatttgattccagctgatattcgtgagcggtataaattagtttctgaagtggaactgattgccggaatgcattttccggaaagctatccagaagccaagcaggctcgacggactgctattttccacgagtttttcttgtatcaactgcagttgcaggcgattaaacaagcagaccgccatgttgaaaatggcttagcactgccttatcaaaacgcagccctcaaggaatttattaagacattaccgtttgatttaacggatgctcaaaagcgggtggtcaacgaaatttgtttagaccttaaggcaccggcacatatgaatcgccttttacaaggggatgttgggtctgggaagacgattgtcgcggcgattgcgatgtttgctgcggtgacggccggtttccaagcggccttaatggtgcccaccgaaattttggcggaacaacattatcagagcctacaaaagctttatgcaccaatgaatgtgacggttgggttactaactggttcgacaaccgccaaggagcgccggacgttgttggcggatattgaatccggtcggatcaatatcattgtcggcacgcacgcacttattcaagatgccgtggtttaccataagttaggctttgccgtcattgatgaacaacatcgatttggggtcaatcaacggcgcatgctacgtgaaaaaggcttgcagcctgatatgctggcaatgacagcgacaccgattccgcggaccttggcaattactgcctatggtgaaatggacgtttcgactatcgatgaattacctaaaggtcggattccgattgaaaccagttgggtgcgtagtaatcaagttgaacaagcgctctcgtttgttcaaaaacaattagctgacaactcgcaagtttttgcgattacgccgttaattgcggagtcggaacaaatggatctcaaaaatgcggaagaaatatacgcgactttggcggagcggtttgagccgcagtaccatgtggcactattacatggtaagttgaaggatgatgagaaaaaccggattatgacggctttttcaaataacgagattcaactactggtttcaacgaccgttgttgaagtcggggtcgatgtgcctaatgcgaccgtgatgatgatttttgatgctgaccggtttggcttagcccaacttcatcaattgcgtggccgggttggtcggggtaagaaaaaggcctactgtctattgattgccgatcctaagaatcaacaaggtgtagatcgaatgacgatcatgaccgaaacgaccaacggttttgttgttgcgcaaaaagatttggaattacgaggccctggtgaggtctttggcgatcggcaatcgggattaccagtcttcaaggttggtgatccagtcgctgattttgtcagcttacaggtcgcacaacaagaagtacaaaaaatcttcacggttgatcctacttttagccaaccggcgtacgcgcctttaaaagcgtatctcgcacaacaaaaacaaaactatcaaacattagattaatgaaagaagaggaagtagcatgaaagtagcagttgatgcaatgggcggcgatttcgcgcctcaatcagtaatcgaaggggttttacaagcccgttcagaatttacggacctagattttattctatatggcgatcaagcacagattgaacccttaatcgatgatatgacgcgcttaacaatcgtgcataccacagaaaaaattgcgagtgatgacgaaccagtccgcgctattcgtcgtaagaagcaggcctcaatggttttagccgctcaagcggttaaagatggccaagcagatgcactcttctcattagggaacacaggggccttattagcagccgggttatttattatcggccgggtaaaaggaatcgatcgtccaggtttaatgcccactttaccatcgattaattctgatcaaggtttcaatatgttagacgttggtgccaatgctgaagctaagccagaacacttgcatcaatacggtttaatgggtaatttctatgctaaagacgtccagggcatcgaaaatccacgaatcgcattgttgaataacgggacagaagcgactaagggtgacgaattgcataaggcaacgtaccaacttttagtggatgatccagatttgaattttgtcgggaacgttgaagctaatgatttattaaaaggtgttgctgatgttgttgtgacggatggctttactggcaatgcaacgttaaaagcaatcgaaggtactgccacaatcgtcatgtcacaagtgaaacacgcgattatggatgctggggtcaaagaaaaaattggtggcctattattaaaagggagtgtcgggggtatcagagaaagatttgatacgtccatttatggcggggctgttttacttggcttgaaagcacccgttatcaaggcgcacggggctgccgatgcacgtacagtctactatacggttaaacaaattcatgtgatgttagctaatcaaacggttcaaaaagtcatcgattatttcagtgaccaagctgcgcaaaagaattctaattaaatagctagacaatgtctttcaaaggcgttacaatgactttcgcaggcataaaatcgattgcttgaaagaaacgtggaagttatgtataatcactggatacccaaaataattaggtgcgaaagtgtttcaatttggaggtttttaacatgagtgaacaagaaatctttgataagattgcagcaattattgctgaccgatttgaattgacccaagaccaggtcacaaatgaattgaactttaaagcagatcttgatgctgattcaattgatattgttgagttcgtcttagaattggaagacacgtttggtgccgagattccagatgaagaagctgaaaaaatcgcaacagtggcagatgccgttgcatacattaaagcgaagaccaaataaagtagtcaattggaccgtgataattcacggtctattttttttgagagtgtgctatcagttgggtatatcctgcggattaacaaagagtggtgaatgattgcgcagcaatcgtttgacatgcgacgttaaccacaaggatatgactaatagcccacgtttagtataggaagggtagctaaaagtcacttttggctacccttcctatttttttgtccccaaacaagacagaaaacttttcgaagttacaaaatagcgctatgattaaacttgtcaatcctttcagggttaagaatagacggtttaaaatgagtgttttcacataataatcgttattatttatgagagattctaattttttaatcacgagcgttggtaattcaactaaattaaattagaatattttaatctttattatttacttttcattttcaatcaggtatgattatttttaacaactgaagggagtgtccacatgagacgagaaaagggtttagtattaggtgtaacgacggtggcgataacattattattggcagcgtgtggttcttcaagtagcaagaatgcaggttcagcagatacggttagtttttcaacaaccgatgtgatttcaacgatggatcctgcattgaacaccgacgtgattggggcgcaggcgttaacggacacgatggaaggtctttaccgttatgaaggtaagaccattaaaccggcgattgcgacgaaagtggttaaaccaactaataatggcttaacatatactttcccattacgtaaagatgcaaaatggagtaatggcaaggctgtgacagcggaagatttcgtctatgcatggcgccgagttgttgatccaaaagttggctcacaatatgcttacatttatgaaggtattgaaaatgcagcagccatcacttcaggtaaacaacccgttagttcattaggggtagttgccaaagataaacacacattacaagttactttagaaaaaccaattccatacttcagtcaattaatgaccagttcaacattcttcccagtttatccagatgctgttaagaaagccggtaagagttatgggacaaatgctaagacattagtcttcaacggcccttacaagttatctggttggaacggcccagatagtgcttggaaagaagttaaaaatactaactactggaatgctaaagctgttaaagtgaaaactttgaaataccaagtggttaaagatccttcaactgctttgaacttattccaaagtaataagcttgatcgcacaaatatcagtggcgatactgctaaacaaatgaagaatgattctcattattcaacacaacaacaagctgctacattctatatgcaagttaaccaagctaagaacccaatcttcaagaatgccaagatcagacaggcaatctcaatgacgattaaccgtaaagagttggttaaccaagtgttaggtgacggttctgcaccagtagcttcattaacgccaaaaggcatgagttttgacccaacgactaaaaaagatttcacgagtgaattaaatgccgagggcaagaaaaatacaacctataatcctaaagaagcaacgaagctttggaaggaagggctagctgaaaccggtcaaacgggtaagacgtttaactacacattattaggtgatgatacggatactgctaagaaacaagcagaatatcttcaagatacgcttgaaaagaacttacctggtttgaaggtaacccttgccaacgtaccatttaagacacgtttaacacgttcggataacggtgatttcgacatggttgtcagtgcttggaatgctgatttcccagacccaattacattcttagacttattcgtgactggtggtgacaacaataaaggtaagtggaataatcctgaattcgatgctcaaatcaaagcaagtaaaacagaaaatgccaataacgataaagcaagatggcaaaatctcatcaaagcccaagatattatgaataaagaatctggtgtcattccattgtatcaatcaggacgtgcctacctcactaacccaagtgttaagggattagattacggtccttctggaagttacaataatgtctcactttatttaaaaaaataaactgactttataaaagatgggtttcggcgttgaaaaacaatgaagcccgtttttgttaggagcgaacttatgagtaaatatttgattaaacggattttttacctagtattaacgctattcattgtcgcttctgtgacgttcttcatgatgaaactgatgcctgggacgccatatacgaatcaacaaaagatgagcgctgatcaattaagaattatgaacgaacaatacggtttgaataagccgctgttccaacaatatattatttatctaggtggtttgttgcacggtgattttgggacgtctttccaatttaataatcaaccggttgccaacctcatcatgacgcgtttaggaccctcacttcaaatcggggcccaagccatgcttttagggtccgttttaggggtcttattaggggcagtcgcggcaattcgcaagaatacttgggtggatggcgtggcgacgttcttttcaatcctaggaatttcgattcccaacttcgtcttagccgttttactccaattcttcttagccttcaaattacaaatgttcccaatcgccttatgggatggttggtcatctagtatcctaccatcgttagcgttagcagtagcgccattggccaatacagcccgctttatgcgaactgaaatggtcgatgtcttgagtagtgattacatcgaattggctaaggccaaagggaactctaaatggcaaacagttgccaaacatgcgcttcgtaattcgatgattccggttgtgacaatcatcggtccaatggcggtcaacttaatgactggttcattggttgttgaaaatatcttctcaattcctggtattggggaacaatttgttaaatcaatcatgaccaatgattatccaaccatcatgggcttgacgattttctactcattcttattaaccgttattattttagtcgttgatattctatacgggattatcgatcctcgtattcgattaagcgacggtcagggggcacgttaaatggcagatgcgaagctaacagcaggatcttttaaaccacttaataaagatacacatgaagaacaagaaaaaattagtgcaccctcattaacgtttatgcaagacgcaattcggcgtttgaagcaaaataaggtggcggtggtctcactattcgtactgttgaccatcatcatcgcagccgcattggcgcccgtgattgcaccgcacaatcccaatacgcaaaatgtggcgtatgccaacctcccacctaaaattggtgacggtcaactaccaggctttaagggtgagacggacgtctccggcgttaaagttgataaatatcaacaagctggtgtccctaaaggcaagtatttcattttaggcactgattacctcggccgggatttattctcacgaattctttatgggacacgtttatcactattaattggggtcctagcaacgctcgttgatttgttgattgggattccatacgggattatctccggttggcggggcggtcggattgatacgttcatgcaacggtttattgaaattatctcttcaattcccaacttaattgttgtggtgctgatgatgttaattttacgaccagggcttttatcaatcgtcattgcgatcggctttaccggctggattacgatggcccgactgattcgggcgcagaccttccaactgaaggaacaagaatttgtgctcgcggctagaacgttaggcgagacaccgttcaagatcgcgatgaaacatttaattcctaacttatcatcaacgattattattcaaacgatgtttaccattccgagtgcgatcttcttcgaagcattcttgagttttatcgggattgggattcccgcacctaacgcatcgctagggactttattatctgacgggcaaaaagcctttcgattcttaccctatcaaatgtggtacccagcagcagtcttatgtgtcatcatgattgccgtcaacttactagcagacggcctaagagacgcatttgatccaaaatcataaagtgcgtcaaaagcgattatatttcgaggattagcatagcaaggcgaatgattgctgcaagcaatcgtttgccttgtgtcgctaaccgcaggaatatacttttgaaagcacgtttcaaaaagagtgtgtcattaacgatagcttttgagcatttgcatagagttgtgaatgagcgacatagtcggttgtttacaattcatagcaaagcgcagaaagctgttaatgaaagcacgtttcaaaaagagtgcgtttggaacggtttgactttgagcattaacttagtgttgtgaataatcggtatagccgattgtttgcaataggtcgttaagcgcagaagtcagtttcaataagcacgtttcaaattacgaaaaaagaccgttcgcggtctcatagttggaggtcgtcaaatggcaaatattttagaagttaatcatttaagtattgattttaagacctatgcaggtgacgtccacgcaattcgggatgttagttttaaccttaaaaaaggggaaacgctagccattgttggcgaatctggatcaggtaaatcggtaaccgtgcgtagcgttatggggttgctggccagtaacgcccacgttaaagccgggaccgtcatctatcatggcgatgatttattgaaaaaaccagaacgtgaaatggatgcgattcgcgggagcgacatctcgatgatcttccaagatccgatgacctcgcttgatccaaccatgacaatcggcaagcaagtggcggaacccttattggttcacaaaacgatgaacaaagaagatgcgatgaagcgggcccaaaccgtgttagaattagtcggcattccgaacgccaaagaacggatgaaagattatccgcaccaattttctggtgggcagcggcaacggattgtgattgcgattgcgattgttgattatccgcaaatcttgattgcggatgaaccaacaactgccttggatgtaacagtgcaagcgcaaattatcgacttgatgaaagaactacaacgtaaaattgaaacgtcaatcatctttatcacccatgatttaggcgttgtggccgggattgcggatcgagtagcggtgatgtatgccggcaagattatcgaatacggtttggtggacgaagtcttttatgaacccaaacatccgtatacttggggcttattaaattcgatgcctacactcgaaacggcgggtaagttagaggcgattcctgggacgccaccagatttgttggatccacctaaaggggatgcttttgcacctcggaatccgtacgcactgcaaatcgatgtggaagaagaaccaccattctttgaagtttccaaaacgcattttgcggcaacctggttattgcatccagatgcaccagcggttgaaccacccgcagcaatccaagctttgatgaaaaaacataacgttctttaaattataaataagaaagtaggcctgtcagatggataaacagcaacgtaaagtcttagttgaagtcaaacatttaaaacaatactttaacccgggcaaaaaatccgaagtgaaggccatcgatgatatttccttcgagatttacgaaggtgaaacattcgggttagttggcgagtctggttcgggtaaaagtacgactggtcgcagtattatccggctttacagcccaactagtggtgaaattaattttgatgggcaagatatcagtaaaatcaaggaacacagtcgccagatgaaagaattccgcaaagaaattcaaatgattttccaagatccatacgcatcgcttaatccgcggatgaaggtcaaagatatcattgctgaaggattgcacattcatcatttggtcaaaaatgaagccgaaagtgatgcgcgcgtcaatgaattgctcgatttagtcggactcaataaggatcacgcaacgcgttatccgcatgaattctctggcgggcaacggcaacggattggaattgcccgcgctttagccgtcaaacccaaatttatcattgctgatgaaccaatctcagctttggatgtgtcgattcaggcgcaagttgtcaacttgatgaaagagattcaggaacaacaaaacctcacgtatctctttatcgcccatgatttatcgatggtgaaatacattagtgatcgcatcgccgttatgcacaacggtaagattatggaattggcatcagcggacgatatttacgatcgcccactccatccgtatacgcaaagcttattatcggctgtgccgttgcctgatcctaagattgagcgccaacgtcgccggacgccttacgatagttcaattgaaagtgacgatggtgatcgccaattacgagaagtcgcgcctgaacactatgtttatgcgactgaagcggaagttgcgtcttaccaatcagctttagcgacacttgtgcaacaagctaattaaatgagaaacgtctattttgaaatatttgtttgcgtgttaaaataaatatttcagaacagacgttttttttatgcgcctttaattcggaataccggcgttcggcgctgtttttttagccgtataaacggtataatagtgaaagattaatcagttgaaatggggtatttaattttggatgcagcactagtcagcgagcttcgcgcccgttatggtattgaatttaataatttagcacttttggacgaagcgttcacacattcgtcttacgttaatgaacatcgcgagttaggcttgcgggacaatgaacggttggaatttcttggcgatgccgttatggaaattacggtctcagaatacctctacaaaaagtatcctgactggccagaaggtaagttaacacgtttacgagcagcaattgtctgcacgaagagtttcagtagcttttcaaaagaagctcattttgaccgttacattcgcttagggaaaggtgaagagaaaaatggggcccgcgcccgggcgacacttttggaagatttatttgaagccttcaatggcgctttgttcttagaccaaggtcgcggcgctgtcgttgattttgtttcacaagtcatttttcccaagattgaagccggtgaattctcagatcaaacagattacaaaacgaacttacaagaattcttacaacaagatggcgaaatcgaaatcgactatcaattgttagcggaagttggcccttcacatgaccgtcaatttgaagtggatgtgttagttggcgatcgggtattaggctctggtgtgggtcgcaataagaaagctgccgaacaagcagcggctaaaaaagcgttggaacaacttaaagcataattgcgattatcaagttagtgtagggagtttagtgcatgcagttaaaatcattagtcttatcaggctttaaatcatttgctgataagacagaaattaatttttcagacggcttaaccggcattgtcggcccgaacgggagcggtaagagtaatatcacagaagcaattcgttgggcgatgggcgaacaatcggccaagagcttgcgtggcgaaaagatgcccgatattatttttgccggtactgatttacggcctcagatgaaccgcgccgaagtcacgttgaatttcgataatagtgaccactatttaaatcaagaactagataatgtgacgttaacgcgtcgcctatttcgtaacggtgatagtgagttttatttaaatcaaaaaagttgtcgattaaaggatatcgtcaacttatttatggattctggcttagggcgagaatctttttcaattatttcgcaaggtcgggttgaagccatctttaacagtaaacctgaggatcggcgcaatattattgaagaagctgccggtgttttaaaatataaacaacaaaagaaaaaggcccaatcagaattagatcaaaccgatgaaaatttaagtcggattgccgatattgtttacgaactaaaggggcaagttgaaccgcttaaagaacaaagcagtattgcacaagattatttggaacaaaaagcgcaatttaacgccttacatcagcaattattggtcgttgaaattgatcaattagcagcagatcaaacccaatatcaagcccaagccaagacactcgctaaggcactaggcgagattgaaagtgagattcaagaaaccaatacggcgttggccgataatcaacaggaagtcgcaacgttggatcaagaaattgaaacggccaatgaaaccttgttggttaagagtcgcttggctgaaaatttacagggccaagaaaatgtttctaaggaacgggctagctatactgatgctaatcgccaaaacttggtcgatcgaatcgcccaattagaaacgcagtcaacaacggctaagcagcaacaaatcgcacttaaggcaacgtacacagaaaaagtcgcaacactaactaacttgaaaaatgagttagcgaccttgaaacgacaagcatcaggtagtgaggccgaattaaaggcgaagattgaacaaatccgccaagactacatcgatcaaatgcaagcccaaacaaccaatcgcaacgaacaacaatatctagaaaaagccttgctacaaacgaagacacaattaacgcgccaagatagctcaatcaatgaaaccagtgcgcaattgacacagatgcaagctgacaaggcggccaaagaagcacaagttgcccaattagcaacagactacgcggctttagaaacgcaactaagtcaattacaacaacaaatcagtgcgacacaaaagcaatatcaaacggaacaaaataattggttccaagcctctggcattttacaaaaggcaaaagccaaacaagccagtttagctgaattaaacgatgattacgccggcttttatcaaggtgtcaaagcggtcttgaagcaaaaacaacaattacctggtttactgggtgcggttgctgaattaatgacggtacctaacgactatcaacaagcgattgaattagcattaggggcacaattacaacaaattgttacgacagatgaaaagacggcgcaacaagcaatcgattatttgaaacgtaatcgactgggtcgggccacctttttaccgaataatgtcgtgaaaccgcggactttaccaagcagtttggtgaaccaactacaaacagaacctggttttatcgggatcgcgagcgatttaattcagttcgacgatgctgttagcccagtcatgatgcatttgatggggaatttaattatcgccactgaattgacagaagcaattaagattggccgtctgacaggacatcggtaccgaattgtcactttagcaggtgatattttaagtccagggggttcaatgactgggggacataataatcgccaaaataatggtggtttattggctcggaagcaaacattaactgatttggaacaacaaattagtaaaatgcaattggccttggaccaaaagcaaaccaaggtacaaactttacaccaagatttggcagagcaacaggcgcaactcgaacaacaacaaggcgcctttgaaacagctaagacgcattaccaaacacaaaaaaatgagttgacgttattaaacgaacgtcttacgcaattcgaacgccaacaacaagcgaccgattatcaagtccaacaacaacaacaaagttacgacgtggacttgaaacgccaaggcgaattacaagcagcagctaccgagattgaagcacaactcacgcagttaaaagcggacttgggtgcggccaatgaacaactacaacattttgatcaaagccaagaacagattcgccaacaacaaaccgctttggaaacgaagttggcagttgcgcagtccgaacaaaaaaatgtacaagaaaagctcaccgatgccacgcaattggctaacgatttaaagcaacaacttgagacaagccaacaagcgctcgccgcattgcaacaagctgattctgaagatgcgatgacgcaaaaagaacggcggacgcaactgaaggccactaaagcactgatccaaaaacttacagccgaattggcaacaaaacggacggcacgagaaacgctgaaggccacgcaacaaacgttacaagctaacgcaacgcgtgtctaccaattgcaacggaattctttagctgagcaagaacaaaacgcggttgctttaaaccgtgttaagattaatattgaccaacgcttaacgacattgcgcgaagattatcagttgagttatgaagcggctaaatcggatttacaagcttccgatttaacgaatgaccaattgaaatcaaaactcaaacttttgaaattaggcttagctgatttagggactgtcaatttagcggctattgaggattatcaacgggttaaggaacgttacgatttcttaatgcaacaagatgccgatttattggatgccaagtcacaattattagcgtcaatggctgaaatggatgcagaagttgaaaaacgcttcaagcaaactttcgaccaaaccgcagcggcctttgaagaaatcttcccaatgatgtttggtggtgggcacgcgtcattaaccttgacggacccatctgctttattaaccagtgggattgatatcattgcacaaccacctggcaaaaaactacaacgccttagcctgttatcaggtggcgagcgcgcattaacggcgattacgttgttatttgccattttaaaagtgcggcccgtaccgttttgtattttggacgaagtggaagcgtcattggatgaagccaatgtcgatcgcttcggtcgttttatgaaacgctatgagagtgagacgcaatttatcgttattacgcatcgcaagggcaccatgacccaagccaaccggttatacggcgtaacaatggcagaatcaggcatctcgaagatcgtatccgtctcgttagaagaacacgaaaccgcctaggaggtaagacatgggattatttgatcgcattaaaaaagcattcacgctagaaccagaaaaagaaccggaaaaagtcgacgaacaagcaacgactgctgaaaaggaagctgacgatccagctgaaaaatcgacagaaaagcttgacgattcaaccggcgagaccgattctggagaaacaccagaaacaccagaaacaccagaaacaccagaaacaccagaaacaccagaaacaccagaaacaccagaaacaccagaaacaccagaaacaccagaaacaccagaaacaccagaaacaccagaaacaccagaaacaccagaaacaccagaaacaccagaaacaccagaaacaccagaaacaccagaaacaccagaaacaccagaagtgccagtcgaagaagaaccaactgaaccagtgattgcagagacaccaacaccagttgaaacagaaccggaagttgctgaacctgaagcaacagtggcgcctgaagaggcagttgttgctaccgatgaaccaacagctatggaagaaacagcggtggcagatgatgtagaagctgaacccgttcaagcagctcaaactgaaaaatatgatcaaggtttagaaaaatcacggaagacttttggacaacggttgaacgctttgttcgctaacttcagaagtgtcgatgaatctttctttgacgacgttgaagaaatgttaatcgaagccgatgttggttacgaaacagcaatgaaaattgcagacgaattacgtgaagaagtgaagttacgcaacgttaagaaaccagaagccgtttcacaagcgattgttgaaaaattagtcgatttatacggtcaagaaggacaacaagaagataatgaattacatttcgccccagaaggtgaattgacagtctttcttttcgtcggcgtcaatggtgccggcaagacaacctcaatcgggaagtttgctcaccaactagaaaaagccggtaagaaggtcttacttgccgctggtgatacgtttagagcgggcgcaatcgaacagttgcaagaatggggccgccgtgtttcagtaccagtggtcgctaataaagcaggcagtgatccagccgccgttgcttttgatgccgttaagcgggctaaagaagaaaactttgacgtcttattagttgatacggctggtcgtttgcaaaataacgtcaacttgatgaaggaacttgaaaaggtgaaacgcgtgattacgcgtgaaatcccaagcgcccctcaagaggtcttgttagtattagacgcaacgactgggcaaaacgccttggttcaagctaaacaatttaaatcaaccactgacgtcaccggaattgtgttaaccaaactggacggctccgctaaaggtgggattgtccttgctgttcggaccgagttacacttgccagttaagatggttggtctaggtgaacaaatgaatgacttacaattattcgatcctaaccgctttgtttacggtttattcaaagacattattgtcggagatggcccacaaagtgagattgatacggatgttagtcaggcgattaaatagaaaattgaaaaggtgtattaagtgggctataggcctacttgatacacttttttaataaggtggtttttgaaaatggaaatggataaagtgctggcgcaaaaagtcgttgcgcggttacatcgagagattccgtacaatattaatgtgatgaatcagcaaggaacgattattgctagtggtgaacccagtcgagttggtcaaagccacccgggggcgattgaagcgattcaaggtcaaaagactaatattattgaacaggatcaaccagatgggacgttacgtggctttaatatgccgattgtggtgcaaaatgaagtgattggtgtcgttggtattacaggtgctccggagaagcttacttatattgcaccactggtcaaagtgacgaccgagctcttaacagaacaggcactcgctgatcaagtgttatcacgagcaaaacggcgcttagagcggtttttatttgattggttggcaattcaagatccagctgcgttaacacctgattttgtgcaagaagccaatgcattgggcgttaatattgatgagcaatatcaggcgatggttattaaaacaccgcatttattaccggaaacggttgaggttggtagctataaattgcgaataacgccggatgaattattaatcttaacgcgccaagcagaagtattagcacactggcatcaaaatgcgaaagaagtccaagccgctgtgggcattagtcaaccacagaagctagtgagtgaggctttaaagcaagcccgcgaagtaattaagtacaatcaaggcacgaatcaaaaattactgtactatacagctgaagttaattatgcctatcgattattatcggcggacatagtcgtggatgagtacgttgaaaagtttagagtgcttgcgcagacggattcaggacaggtattgattactacttttcaaaaatacttcaggaataatggcaatattgtggaaacggcccaccaattgcatatccatcgtaatacgttgaattatcggctaggtcagattaaagataagttaggtctggaccctaagcgatacgatgaacttgttattttatatacggcttttttgaattatgaattacaatagttgtgcaagtgcccaataaagttagctattctgtcaatgttatatagcagcgttaccgattacaatgattgtgttatataacaaaacgggagggtaatttagaaatgacaattatttggtgggcagctctgattgggcttgcagtagcgattattttgattttaagtcggttaaatccggtttatgcattattgatgggtacaattgtgggggcgttagtcggcggtgctagtttagcgcaaaccgttgacattattgttactggtgcacagagcgtcatgggaacggtcatccgcgttttggcggccggtgttttagccggtgtgatgatggaatccggtgcagcggatgcaattgcgcgggcgattgtcgaaaaaatgggtgatcgttttgcaattttggcgttaaccttagcaacaatgattatcaccggtgtcggggtttttatcccagttgccgttttaattgtggcaccaattgcattagaggttggtcaaagaatgcatatttctaaattagccttgctagtggcgttatctggtggtggtaaggctggtaatctgatttcgcctaaccccaatacaatcgctgcagctaaaggatttaaccttgaattaagccaagtgatggtggcagattttatacctgcactttttggcttagcaatggcagtcttgttagcgacgttgctacgccacaaaggcacacaggttacagaagcagatattgcacaacaacaaacgacaactaaagatattcctagtctaaaaacggccattgtaacaccgctattggcaattatcttgttactcattaatccaatgggcaatattttacatctcaaagcgctacaaagttttcaagttgacgctatgtacatcctcccaattgctgggattgtcggaacacttgcgatgggaaaagctagccatttattagattatatgaaagccggaatgaaccggatgacagatgttgtcttaatcttaattggtgccggttcaattgccgggttaatcggcgcttcaaacttaccaagtcaagtggtttcattggttaaagcgagtgggatttctgggacattcttagcaccaatttcaggaattttaatgtcggctgcgacagcatcgacatcaacaggtgttattttagcaactggttcattcagcaaaccaattttagcctttgggattcctgctttaggagcggctgttatggtacatgctggtgcgatggtcattgatcaattgccacatggtaattacttccacgtaacagctaatgcgatgcagatgagttttaaagaaagaatgcaagccgttatttgggaagcatgtgttggtttgacaatgacaattgtggccgttgtaatgtacggcatactatgaggtggataaaatgaaaattgtattagcaccagattcattcaaaaattcagtgacggccatcgaagcgagtcatgcgatgcgggccgggtttgaaaaagtttttccaaaagcgacttatgttgaagtccccatggcagatggcggtgaaggaactgttcaatcgatggttgatgccacagggggtcgttttctaacggctgaagttgtgaatcctttaggacaaaaagtcactgcgcaatatgggattctaggcgaccaagaaacggcggtcattgaaatggcagctgctagtgggatccaatttattaatgaacaaacacgtaatccgttagtaacgacgacattcggcacgggtcagttgattgaagcggctgttaaacaaggtgttaaaacgattattattggtcttggcggtagtgctaccaatgacggtggtgccggaatggcgcaagcactcggtgttcaattgttaaacgccgaccagcaatccttagggtttggtggcggtgctttggctgacttagcaagcatcgatgcaactgggatgttaccagccttagcggacgttaaaatcgtcattgcgtcggacgttactaatcctttaatcggtgaaaaaggtgcctcagccgtctttggtccgcaaaaaggggcaacatctgaaatggtcgcacagttggatcgaaacttagcgcactacgcggccattatcgaacgtgatttaggcatcagtgttgcgcaaacaccaggtgccggtgcggctggtggcttaggcgctggtttgttggcctttacgaaggcacaattacagccaggcgttgaaattgtgattgaaaaaacgcaactcaaaacggctgttgcagacgccgatatcgtcgtcactggtgaaggtgggatcgatttccaaacccaatatgggaaaaccccaattggtgtcgcgcaagcggtcaaagcggttaatccgcaagcaaccgtgattgcgattgccggtaatatcggtgaaggaactgacgtgctctatgatttaggcattgatagtatcttttgttcaacaccgggggtcatgtcattggaaaaagcgttggctaataccaaggctaatttaacccaaacaagtatgaatatcgcacgcttaattcaaaaaacaaagacacactagattaatttaaaacacactcaatttagagtgtgttttttagtgcgctaatccggaataaaagttgactaaccccgtcaaaataggtactctagtacttaggtcaatctactatttggaggcgtcaaatggaactcgcacaaaacgcacgaatgaattcactatttgaattttatggcgcacttttaacggcgaaacaacatagttatctctcattatattatggcgatgatttctcattaggcgaaattgccgaagagtatcaagtcagtcgacaagcggtttatgataatatccgccggactgaaaaaattcttgagggctatgaggctaagttgcatctgtttcaaaattacgaacagcaaaacgctagtgcagacgcgctccagaagtatattcaagctcagtatccaaatgatcagcaattagccaaactcttggcagacttgctgaatctcactgaacaataaatcaatttaaaggaatgatcattaatggcatttgaaggactaacagaaagattacaaggtgcattaagtaaattacgtcgtaaagggaaggttactgaagctgacgtcaaccaagcgatgcgtgaaattcgcttagcgttattagaagccgatgttaactttaaagtcgttaaggacttcattaaagtcgttaaggaaaaggcaatcggaacggaagtgttggagagtctctcaccagcacaacaaatcgttaagattgttgatgaagaattaaccaagatgatgggtgaaacggctgtaccgttgaacaaatcaccaaaaattccaacgattattatgatggtcgggcttcaaggggccgggaaaaccacgactgctgggaaattagccacttatttaattaaaaatgaaaaagcacggccgttgatgattgcggccgatatttatcgtccagccgctatcgatcaattgaagacggttggggaacaagttggggccccagtctttgaaatggggacggatgttaatccggttgaaatcgtacgtcaagggttggcacaagctgctttacaaaagaacgactacgtcttaattgatacggctggtcgtttacaaatcgatgaagccttaatgcaagaattggctgatatcaacgatttagcccatcctaatgaaatcttgttaacagttgatgcaatgactgggcaagctgcggttgacgttgctgaaggctttaacagccgcttagacatcacaggggttgtcttaactaaattagacggtgacacacgtggtggggctgccctttcaatccgtgcggtaactggtaagccaatcaagttcactggtcaaggtgaaaaattaaaccaattagatgtcttctatcctgatcggatgagtagccgaatcttagggatgggcgacatgttgagcttgattgaaaaggcgcaagaagattacgatgaacaaaaagcggttgatatggccgaaaaaatcaaagaaaatagctttgattttaacgatttcctcgatcaaatggaccaattgcaaaatatgggaccattggaagatatcatgaagatgattccggggatggctaataacccccaacttaaaaatatcaagatggatcctaaggatatgacccacatgaaggcgattgtgcaatcaatgacaccgcaagaacgggaaaatccagacttattgaacccaagtcgtcgtcgtcgtttagccgctggtgctggccggccaatcgttgaagttaatcggatgatcaaacagtttaatcaatccaagaagatgatgaaccaaatgtcaaaaggtaactttaatggcatggaaggtttaatgggcaacggcatcaagggtaaaatgggcaagatggccatgaactcaatgatgaaaaagcaaaagaagaacaagaaaaaacgtcttaagaacgcacgtcgttttaaatcttaaaaaaattcgccctgtaaagaaaaaacactttacacggcctttaaaatttggtatattatgacatgttaaagaattaataggaggtggcattaatgtcagttaaaattcgtatgaaacgtatgggttctaaaaaacgcccattctaccgtatcgttgttgcagattcacgttcaccacgtgatggtcgctttatccaacaagtaggttactacaatccattaacagaacctgttgacttgaagttagaagaagaagttatcatggactggttacaaaaaggcgcacaaccttctgatacagtacgtaatcttttatcaaaacaagggattatgcaaaaatatcacgaagctcgcttcgctaaaaagtagggatttgttatgacagacgtgaaagaactaattattgcaattgttcagccacttgtcgaacatcccgatgatgtcaaattgactgaacatgagacggaacgttttatggaatttgacttacaggttaatccatcagatatcgggcgtattattggtaagcaaggccgggtagcgcagtcaatccggaccattgtctatagtgtgaaaacaccttatcaaaaacgcgttcgcttaaatattgtagatgcctaatcaaacgtttaaatgaagcagagatgttttgtttaagcgttttttgttgaataaggagaaattaaatgccagaaaaatactatcaagtcggtaaaattgtgaatacgcatggtattcgtggtgaagtccgcgtcattgcgacaaccgattttacagaagaacggtttaaaaagggaacgcacttggcggttgaaatgcctaatggcttaacaccagtcacggtttctgcaatgcgtcaacataagcaattttacctattacaattcgaaggcttaggaaacattaacgacgtcgaattatttaagggacacaacctcaaaattgcggcaagtgaacgtgatgatcaacttgaagacgatgaatattactacggcgatatcattggtttagaagtgattgaagaatctgaggggacaagctatggtaaggtctcagaaatcatcgatcccggtcctaatgacgtgtgggttatcaaacgtcgcggtcgctccgatttattactaccatttttgaagtcagtcattaaaaaaattgatattgaagcgggtaaggcctacgttgaagtaccagaaggattgattgataatgaagattgatgttttaagtttattcccagatatggttcaaaatggtttatcgcaatcaattatcggtaaggccatcgatcgagatttaattgatctagaagtcactgatttccgtgatttctcagtcaataaacataattcggtggatgatgcgccttatggtggtggtgcggggatgttactccggccacaacctatttttgaagcgatggaccaggtgaatgctaaaaatcccggtcataaacgcgttattttattagatcctgctggtgttacttttaatcagaaggttgccgaagaatttgcacaagaagaccacctcgtattcatttgtggccattatgagggctatgacgagcgtattcggaccttggtgacggatgaagtctcattaggcgatttcgtcgtcacaggaggtgaattaggcgccatggtgatgattgatgccatttcacggctagtgccaggtgttttaggtaacgaacagtcagccgtcaccgattcgttctcaacaggcttgttggaacacccacaatacacacgaccaccggaatatcgcggcttaaaagtaccagaagtattgatgaacggtaaccataagctcattaatcaatggcgggacaagatgtctttgaaacggacttatgaacgccggccagatttattggaaaactttgatctaaccgcagatcaacaaaaatggttacgtgaaattaaacaagaggccgctgaaaaataagccttttaattaagtttgatttatgctaaaattgatagctgtgatgataagtcataaaacaacggtattccgctggcgcaagacgttaatgaatatctgtgaaaaaggagagattcagatgaatctattaattcaagaaattactaagtcacaattacgttcagatatgcctaacttccgtcctggtgacagcgtacgtgttcacgtgcgtgttgttgaaggtactcgcgaacgtatccaattattcgaaggtgttgttattaaacgtcacggtgttggcgttagtgaaacttatactgttcgtaagatcagtagcggtgttggtgtggaaagaactttcccattacactcacctcgtgttgctaaattagaagttactcgtcatggccgtgtacgtcgtgctaagttatactacttacgcgcattacgtggtaaggcagctcgtatcaaagaagctcgtcgttaagatgacatttaaaaaggccgactcattgcgaggcggcctttctttatgtggttattttgtaagttaggtgatgaaaaatgaaccattggatttatattgtcatgtatcaagcaaacccactctattatgagaagagtaagatgatccgcgcgtttagctcggaacaacgggctaaggaatacgtttcgctattaaatgaaacgccctatgccaaccaatctttaaaagagggccattacacctatcagaagttgagtctcaactaacttaataaatggcgcttataagacgcaatctgtggtttcttcggaacagccggttgcgtttttttgatagggaccggtttaggggtcgccatcaaagcaagtagcggctgacatagtagggtaatgattgaaagaccaaggatgataagtaatgcatgcagcgcaccaggtgattgttttaattcatcgaagtaggcctcgaaacgattgttgaagttattgaggttttgttcggcattatcgctaggagtcgcatgatgagccttagggccacggtgtgtttcaaaactaacccggctttgagtctgattgcgcgcgatgcctctatcgaataagtaagggcttacaaaagggagcgcaaataaacagatgagatttaaaataacaaaataccgtttcatgatgagacctcctaatagttttatcttcaaactaattatatcacaaaataatatttaacagggttttgattgggtgaaatgacacgtttataacgataaaaaaggggttgagacaaaagtatcttttgcctcgaccccttattggttaattacgagcgatatatgatttgagtgccagtactaaaccggcgaataagaaaataatagcgagtaataaataattaggaatgataattaacgttaaataacctaagatcgccagtaagttagtgaaaagtgcgatattttgttctaatgacaacaagtaggcgatgacatgcaaaagaatcgccaccaaggctaaccaccaaaccttaccgatagcgtccatataggtcggtaagaaattagaaaatggtggattcaggatcaaaattaaagccgattggaacagcgtcacgactaaaaaaataaaatcaaagaagaaaggaaacttgtaaggtgatattttcatctgagagaacctctatcgtcaaagtataagatagtattagtatagcggagttggggggaaaagggaatagggggaaccatgcaactttaatagaagataaaacgttgcttatttttagtaagtgatgtatgatgaatttgtcaaagatgagcaactcatcaatgagtttaaaagttgaaatggagatgaaggcaatgttagtcattaaatatgtaaatggtcaaaatagtgccgaaaaaatttatcaaaaagctgctgagtttgtggcaaatcaacaactagaagtgccagactttgaagactatgttcaaattgcggaagtcacattggatggtaaaccattgacattagacgatgcaaccatgcgtgggctatataattatttaaaccaataaaataagaaaataaaaacgtcgctcggaaaagcgacgttttttagaagatcatagggtcagtggcataaatatgttctagtgggtgataggttagaataatgccttttcagtttgttataaatctggtataataactactgttatggagagttggcagagtggtaatgcaacggactcgaaatccgtcgaaccggcttataccggcgcgcaggttcaaatcctgtactctccttaagctaaagtcctatattgtcctatgtaagccgaatcgctgttaaatcagtgattcggctatttttttgtttaatttaaaaagtcatattgtcctatatacgccgacaaaggttagtcaaaaaggttagtcacttctatagggttagtcaaaaatgaagtaagcaggttagtcaattattgcaaatatacaaattacggtttttggctaaattttgattagtcaaagttaacatccaaggcatattttaatttatctttttgattcgatgttattaaattgattgtgtaagcatacttaaaaatacgattagcgtatttatctgcccaacgattaacaattggttgtaatagcttaggcgtaatttcatttagtgggatggatccaatttctggtaagatgtgacaatcaaaaatctgcttagttttgtagattgtactagattggacggtagttcggtaagattcactaaaccactttaaataagcttgatgaaaggtaagagcaggagaatcagttaatttaaatacatacttatcattcttaacccgagcttctattttacgaaattcagcattagctgcagcgggtgttttaaaccctcgacgagtgataactgattttttatgggtctcgggattaataccaacataaattctaaacaggtatcttctttcgcctttgctaatatattctgtaatagcgttatttttatcatacttaaacatagggacacctcttacttggaaattaatggttaattttataaattacataaataaatctagataaatgttaatggaatgggtaaaacataaataattagcttacaaatgcaaacgtatgttcttttgggtgacaaataaaaaacccaacaggggcttttatttaatagataatttatcttttacttcattcttattctgaaaatcaataacatcaatttcgtgagacaaaagtccatcaatgaatggtttttctttatcggatataccatttataagaatattgaatgaggagttggtgccatagttattctctctgaacccggaagtgtcactccaaataccgataattgcttccatagaatttttggatagggtattgtacattttagttagtttaaattcatttggttttggagtgaacaagtattcaaatttatatttttggcttgttttaccatcagcataaatagtatttaaaaaactataatcagatcttctttcattaaaataatctctaacatcatcaaaaaaaacactagcagtattagttctgttcataaacgcaatatcagaaacatttattaaaacctgaataaaatctgttatcgtttgagatagttcgctctttttaactaacttaaagatagtatcattctttccaattttaaagttatagggggtaataatagaaagcagtattcgccatctattagattgctttgatttcacattaataccattagaagtaagattccagatggtataaccctcgtcagtaacttgataaatgtcattttctttcgaaataatattaaatagaataccatcaccgaaattatctacaaaaggtgtaataacttgtattttattattatctagtcttttgaaatttgtttgcccggtcatccaagaagaccagttgtttgcgatgctttttatttctaaatcctgagtatccatcttttatccccctttctaacgaatttaaaagtttaatggttgcggaattgttaattgaagtttatcacggttgctggtattagtatagttaaaaaggtcgtctattgcttctagaatatccctagtatttcttaaaacgcccttgggaagaggggatgcttttgtatgggttgttccatctccttttgaataaaattcatcctccgaaaatatattaactctgtttccgtatatcttttcgccagtagaatttttatgaaaactatcatttaaattcattctgataagagttaattttattttttcatccataaattgtagatgaatattgttgcttgaatagaagtaccgtaaagaaaatttccttccagaatttgaggaaatgttaactattccgcgatcgccatctgttaggattctagttgttttttgtgttaatttttttagggatgcaattaaatcatcagcttcgtgttgagttagtagtagttccattattgattcctttcatggggaaagttatcgcctaatccccagccgcgaatcgaacgcggctgtctcaccagagtggagggtatttataattagtctaaattaatagttaaatcatagttatgattagaattttcatcttcgtaatcatcagtatcatagctagcattaaacttatatcttaaagatttaatatcggaaatattatttagtttttctagtgggaaaatgacgtcacccgatttattggctccgttagcgatatctccaccccaattagttgttacacccttcatagaaggcataatagcctcctgctgttgtccgtcgtttgtaatgatagttccttgatcagggaatgtagcagttaaatcacgagaaggcttaactgctacatttagaataattaaaccttcagcctttttaccggattctgaattgtattcaaaaggttttactttaatgactcttgcgcttgaaatagaaacagaagccgagttccaagtagtgtcagatacggaaagtttgtaagtcttttccgaaataataggaaccttgttatagtcaatcgttaaactattagaattatcggttctatttttagaatttcctttttcagcagaagttgttgtgtgagctgttgcatttgattctttagtatcatcgctaccccctgaaagtgctgcgaaaataaatataataacgacaactgctagaacccagatccaccagcgcttatacaaaggtttaacttctacaaaagtattcccgttttcatcttgaattttttttgacataatttattacccccaaaaaattattttctaataagtgcaagaattcctgcgacaattattaatactccgcttaaaacaccaaatgctgaaacaaaaacaatatttaaaatgccacagacaatgattaaccaacccatcacaacgcgatttttattaatcatacatactaaaataattgcaacgatgcttgcgacaacacaaccgaagcccaatccaaacaagctacttgatgaagtattgttgattgcactgtcaaaaccacccattaagaacgaaaagacaccagcgataatcccaaatacgccacccatgattcccaaaatcatttcagctgtacgtgaatgttggctttcttgattctcgctgacttgtttgtaaactttaccgtctgcacctttaattttagtgctcatttcaaatcctccaataatatatacagctttttaagtcgtcagtatttggactcaataataattattgataaaaccactttttcacattgttaattagtatatcaaaacttgttataaaaatcatttaattatatagaagaaaaagaaaataatagagtgtgattaaaaatagaatctaaatgtagggtgatatgtaatcgttctccgaacacatagttttaccttattgtacaattagtaatttgtataaaacgattaactgtgttatcctttttacaaggagatgagtgaccgtgaacaaacatttttatgggaaatacgagattaccgaagcgcaagatgagggacagtatgttgcaacgatcaaactatgtcagtcgattaagaaggtagtggtaaaatccgatgcactaacaactttagcgcaagcgggtgtgaccccacaaacggtcattcacaatattgtgaagacgccaaccttgttgaaggataaggtgattgtttctaatcacaacttagcaggctatttagattaatatgaattaaaaaaggacatcgattcgcaatgttaaatcactcgttgtagtgattacattggcaaattgatgtcctttttttagtcttcgctaatatctgcgaaagtgcctgagaccacccggctcaggtcttgggggttaatctggattgaacggccaattttacctgatgaaacaaagattaaaggttctttttcggcttgttggtcgatatagattggaaaatgtgctttttcccaaataccaacgggcgtattggcgccatgttcgtacccggttgttgctacgagatcctttaaagggaccatcgcgatttttttattaccggaaatcttgctgagtttcttttcgtccaaatgacaatcgatggggacgacaccgacaattgggccggtttgtttgcccgagagcacgagtgttttatagatgagatgttcatcaatatccaagtgatcgacctgcatttgtgcgacgtgatgttcttcgtgtgttggaaactcaaattgtgtataggcgaccttttgtttgtctaatattttttcgacaagggtctttgcgagttgtccttgttttttctttttacccaaaatagatgccactcctttagtgattatagttagtttacggcaatttgttaaaaatgtaaatttaaggaccgccattaatgttgaataggggtataatgactttaaataaggagttgattgtgatgaaatggtttagaaaacggcaagaaacagtaagtggtgttcaagcacatgattttacgcaattggtcagtcaagcaagggataacgatgcgcattatcagaagattcgggtggccttttcggggttaaccaaaccatatcagcaaccaattcacaaaaaatagtgattcgtatgagcttattctttaataaatttcaattattttgataatctatacttaagtcaattattgactaattgaaaaattaaaggagcggatatcgatgacaaccaagacaataccggctgtaagctatgtggttcaggtgaaccaactgctcgagagattcgttgtatttgaaacggtgtttttcgagtgtacgcaaacttgtaggaatattattttaggaagatgcacagtcggtgaaacgttagcgaccctggatcattacgttgaccaaaatttaacggtcctgcgggcatttgttactcaagtcgctgcggtgcaaccaccaactgcgtttgtcacgattaatcagcaattaattacggcacttgaacactacgttgatgcaacagaaacgatggttcattcttttgaagggccttctaaagaagtttatgcgcaagttttagcggcgcgtcatgatcaagaaacacaacgtgaacaaattaacacagttttacatgcgatttctatggttagtttttcaaccgctgatatggcataataaaggtaatttaaatttgagcaggtgacattatgaatagacagacttggcattttcttttttataaatcaggctttaccaaagaacagattgatcagttactagcctatttaggacagcgacagaatttcggcggttttccacttgtttcactcacgcaagatggtgatagcaacgagattcggttcgtaacgatggtctttgatcctttgtcagagattatcccatcggttcaagaagaaatggcgaagtttattttaatgcacgcgattcgaccagcggataatacggaagaagctgatatgcgtttatacgggcgggttatgagtcactcgcttgaagatttaggcattgaatttcaccgttatgatgctaatacaatggatattaattattggggccaaaaaaaggccgactaaaattggacgtttcaatcagaaatcgattaagccggagacaattgtcacggctttttttgtgtttcagatgataagtgctttagattcattgcgtaatcaggtatgatattagcaggtgttcggctgttattgatagccgatgaatgaacaaattaaaggatacggtgacaattatggtcgaaaaaaacatgttagaattttttgaagcagaattagatgatttacaatttagcggcgatatcaacatcaactgggataaacaatcacgggcgatcgaattagaattcacgttaaatgtgacgaagagccaagaattggctgtcgaagatcaaaatggcgaattaaatgaatcagatgaaattagttatgaagatgcaattttattcttcgatgaaagcaaaatcgacggttttgaatatgctgataactatttagctgtcattccattttctggccgccaaggtttgaatgcccaagtcgggcgtggtgttttcaattatctccaagacctattagatgatggtgaagatcgtttagctgcctttgtaaacgatgaatcagatgacgaaacatttatcttggactgggatgacacggttttccaagcaaccgttgctcaagccagtgatgacttagctaaaaaatactacacttaccctaaatactaagaatagatttcagcgacaggtcaaattcttttggcctgttttaatcattaaggagcagaatacatggaatggacgaaagtcacagttgcaactgtcaatgaagcagttgaagcgatcgcaaatattttaaccgaagctggcgccgagggcattcaaatcgaagacgcctcaattaacgatactttagtcggagatgtggcagcagtcagtgcctttttcccagaaacggtttttgttcctgaaaagttaccgttgattcgtcaacgcgtgttacaactcacggaattcggcttatcaattggtgaaggtagcgttaatctacaacaggtggccgatgatgattgggcaactgcatggaaaaagtattatcaaccaacccgtctaacccgtttcttaacggttgtgcccagttggacggattaccaaccaacagatgaacgtgaagctttaatccgaatggatccagggatggcttttggtactgggacgcatcctacgacgcatctttcagtacaaatgttagaaatggttttacgcggcggtgaacaattgatcgacgttgggacaggttctggtgtcttgagtattgcggcagctcatttaggtgttcaagatattcgcgcgtacgatgtagatcaagtcgcagtggatgccgcggtggctaattttgatttgaaccccgttacacaaggcatcattgccaaaccaaacgatttattacacggcattactggtgcggctgacgtaatcgtcgccaatatgttaccagtggtcttagtgcccctgattccacaagtgccggccttattaaaagaaggcggccacttattattggctgggattatcactgaaaaagaagcggtcattcgcgaaacattgagcgctaacggtttaatggttgaagaaagccttcatatgggcgattgggtcggcttgattacccggctaaagacggacgaagattagaggtcaaatgaatgcaacgttattttattgaagaaaccgtgacggttggtcaatcattacaattaaccggtgaaacggcgcatcatatgctcaaggtgatgcggatgcaagttggcgatcagattgaaatcgtgacgccagaagaattagcttttatcacacaattgcaatcagcagatgcgacgcaaaaacaagcgactgtgacagttgaatcagccgtggaaacagatgttgagctgccgattgaaacgacgattgtctgtggcctttctaaaggtgataagaccgattggatcgttcaaaaggggacgcaattaggcgcacatcgctttatcttttgtaatagtcaattttcagtagcgcgttgggatgctaaaaagcaggtgaagaaactagcgcgtctgcaaaagattgcccaagaagcggctgaacaagcgcatagaacccatgtgccggtgattgaatggcgcgcgagtttaacggcaattgctgaagaatcagcggacattaaattagtggcgtacgaagaatcagccaaagccggtgaacacggccaattggttcaaagcctacaatcagcgcaaccagggcaaagtttaatctgtgtttttgggccagaaggtggcattgcaccaaaggaaattgaggccttacaagcagcaggtttcttgttagctggtttgggaccacgaattttacgggccgaaacagcaccgctatatctactaagcgcaatttcatatgtgacagaattgagtactttatagtatgataggtaataataatttttatagaggggcttcacaatggataaaattaaaaataatcgctttttaaagcaagtttgggtccgttacttcttagtagcgttactccttgccgttgtattgccactcgttttcggttggttatcaattagtaaaacgtggcgcattgggttgctgtttatggcaattaatggctgtgcagcctttttcatcggctatcgcattcagaaaacacacgccccttggtataatattttttatctgccagttttatttgccttaatggttgttgtccgcttcgcagattataattattggtttgtcccaatttacttcttattaagttatttgggtattaatactgcgtacgaacgtcgcaaataaaactgactcgacaaactgttgagccagttttgttgtttaaaaaacaaattttagtagagtcggaattggagttgggcaagatgtcagaagaaaaagtgatttcacagcaagaagtgatccagctatgtcagaaatacatgaatgctgagcatcttgctttcgtgcaaaaggcgtatgattttgcagcgtatgtgcataaggaacaagtacgtcaatcaggtgaaccgtacattattcatccgattcaagtcgcaggtattttagcagaattgaagatggatccggcgacagttgcgtcgggctatttgcatgacgtcgttgaagataccaatattaccttaggtgatgtgcaagagatgtttggccaagatgtggcagtcattgttgatggtgtgacgaaattagggaaaattaagtataaatcgcatcaagaacaactcgctgaaaatcatcggaagatgttgttagcgatggccaaggatttacgggtcattatggtaaaactagccgatcgtctgcataatatgcgcacgttaaagcatttgaaacccgaaaaacaacggcggattgctaatgaaacgttggaaatttatgcgccattagctgatcgtttagggattagtaagattaagtgggaactagaagatatttcgctacgctatcttaacccacaacaatactatcggattgttcatttgatgaattctaagcggacacaacgtgaagcttatattcaagaagcaattgaagacatcaaggattcagttgccgatttggacatgaactacgaaatttacggtcgtcctaaacatttatattcgatttaccgcaagatgcgcgatcaacacaagcaattcgaagaactctatgatttactcgcaattcgggtagtggttgactcgattaaagattgttacgctgttttaggcgccattcacactaagtggaaaccaatgcccggtcgttttaaagactatattgcaatgcccaaagcgaatatgtatcaatcgattcatacaacggtgattggtcctaaaggcaaaccacttgaagtacaaatccggacgcaagaaatgcacaacgttgctgaatatggggttgcggcacattgggcttataaagaaggcgttaaggaacaaattaagatagatgaatcaggccgtaagttagatttattccgtgaaattctagaaattcaagatgcctcagatgatgcatcagaatttatggaaagtgtcaaaggcgatatcttcagcgaccgcgtctacgttttcacccctagaggcgatgtttacgagttgccaaaaggctcggtaccaattgattttgcctatctcgtgcatacggaagtgggtaatcatgcggttggtgctaagattaacggcaaaatcgtcccattaaattatcaattacgtaacggtgatattgtggagatgttaacctcaactagtgcgacaccaagtcgggattggattaagttagctttcacagcccgtgctcgtaataaagtaaaacggtactttaaaaaagaagatcgtgatgaaaatgttgaaaaaggccggacagcaattgaacatttgttgttagaacaaggtcatactgtgaaggcacatctgaacaaggatagcttagcaatcattttgccgcactttaattttaattcagaagaagaattatttgcagcggtgggctttggtgaaatctcagcacaagcggtcttgaaccgattaacacttaaggaacgtcgtgaaaaagaagagaatgaacaaaaggcactagaagctgaaattttatcggccaaggattctcaaaaaccaggtcaaaaggctgctggtagtcatattacgattaaacatgaagacggcgtcatcatcgaaggtgtcgataatgtgttgatgcgcttaagcaagtgctgtaatccagtgcctggcgacgatattgttggctatgtgacaaaagggcgtggtgtttcagtccatcgtcgtgattgtcccaatatcgtggatcgtgccgatatgaacagtcgactaacggaagtcagttgggaaaatacgtccgctaaacatgatcaactctacgatgccaacttagaggtctatggttacaatcggggcggtttattaaacgatgtcttacaagtgttgaatgcacacagcaaacaactcaacaatgtcatggggcggattgaccatgataaaatggctgatattcatgtgacggttgggattcgcaatattgatcatctcgaacggattatggaagccgttaaaaatattccagatgtttacgaagttaaacgagtgcaaggataggagtcgttaaccatgaaagtagtcttacaacgtgtcagccaagcaagtgtcacaattaaagaacaagtcgttggtcaaatcaacaagggctttttactgttagtcggcatttgcgatgacgatacagaggccgatttggattacctcgtcaaaaaaatcagtcaattacgggtttttgaagatgaagcagggaagatgaatttggcgttagggcaagtcaatggcgccattttatcagtatcgcaatttacgttatatgcctcaaccaagaaggggaaccggcctagttttacaggggcagggcaacctgattatgcgcaaaaaatgtatcatttatttaaccaaaaactagcggctactggaatcactgttgaaacgggtgaatttggggcggatatgcaagtcgcccttgtcaacgatggtccggtgacgattttatttgatacgagggataattaatggcttatcaaaatgcaatttgggactttgatgggacactctatgatacctatccagtaatgttaaaagcgctcgttgcggtttatcagcaacaacaagtaccagttgatcagaatgctttgtacaaagcgattaaacaaacatcaattaaaaaggtgttacaagcattagccgatcaaacggggactgcatttgcgacattagaccaacaatatcatcaactcgaggcgaagacgcaaattgcaccgcaaccttatccaggggcggcggctattttagaacgggttagtcagaccgggcgtaacttcttgatgacgcatcgtgatacagcggctcaaaaatatttggcggaacatcatctcgaccagtattttacggagattgtcactagccaaaacgggtttgcgcgcaaaccggcgccggacagtttgaattacctctgcgatcgttatcaattagatagagcgaagacagttatgatcggcgatcgcgcgttggatattgaagccgggattaacgctggacttcaaacggtttattttgacgttgattgcttactaattgcggcgcaaccgacagtgacgattactgatttatcgatgctgattgattatttcaataaatgatatcaaaaaagtcgcatgccaatttggcgtgcgacttttattttacaatcaatgcgataacgagaaaggcaaggtaccaagcgcctgacattaataagacatagcgccaccagcttttgaaaaacttgcggggataaagcgcatggtcgtaataaaaccgcgttagactccaaatgatgccccatacgcagatgaccaagcagaaataccaaccagctttgttgaaaaatggttggctaagcgcgatggcacttattaaaaatggcacgggtagccagtcgacaaagtgaagttgttttttgaaaaagcgttgcaatacaagatttaagccgtaaccgatggctaaacaaattaacggtaatagaataaagaataacgtagccgtaaatggcatttgaatcacctcgaaagttaatatccccattgtaccgtctttctgaaaagataaaaaggactaagttgcactttgcattgattcggtgtaaactgctgataagaaaaaagactaggtggtggaatcgttgaagaaacaaacaagtacttttagtcggataaccaagatttttgtttgggttatgttaatcgccacagtaggctctgttatttttggctcattggcagcaaccggcgtcttaaacttctaaaattaattaaatgattggtctagggtattttgccctaggccttttttgttgtggttcgacgatctatttaaggattgttcactagtgaacgagatgtcgttaataggcagtgctattaaggcgcaaaatggttatggctagtgggttagtgggaataaatcctaaaagataagattttggttttttttagtcaaaatgtggtagaaagtgggggattatggtagactaaaatgagttgaggtgggtaaaggggtgaagtatatgttcatgggtgaatttcatcacacaatcgacacgaagaaccgattgattgtaccagccaagttccgggaagcattaggaactgaattcgtgttgacccgtggtatggacaattgtatcttcggttacccactcagcgaatgggaacagttggaagagaaattaaaacaactgccactcgctaaaaaagatgcacgtgcttttgtgcgttttttctactcagctgcggtgcaatgtaccccggataaacagggccgcattatgattccccaagcattatcaacccacgcttctttagaaaaggaatgtgtgctgattggggtttccaatcgaatcgaaatttggagccaagaaaaatgggcgagctttagtgaagaagctgaagaaaatttcgatgacattgctgaaaatatgttagattttgatttttaaaggatggtaacaatatgacagaaacatttaaacatcaaagtgttttattaaaagaaacggttgatgccttaaatgttcagccagacgggatttacgttgatgcaacactaggtggtggtggtcatagtgaatacttattgtcacaattaacaaccggacatctttattcatttgaccaagacgaccacgcacttgaaagtagtcgccaacggttagcgaagtatgcggatgcaggacaagtgacatttatcaagagtaattttcgatttttgaaaacagcactcgctgaacaaggcatcacgaagattgatggtattttatacgacttaggtgtttcatcaccacagtttgacgatgcccaacgcggcttcagttataaaaaagaagcgccactcgatatgcgcatggatcaaggcgccgagttaacagcgtatacagtcgttaacgaatggtcttaccaacaattgattaaaattttcttcagatatggtgaagaaaaattctcaaaacaagtcgcacgtaaaatcgaacaacaaagagaaattgcacccattgaaacgacaatccaattagcagatttaattaaagaggcaattccggcaccggcaagacggacgggtgggcatccagctaagcggattttccaagcaatccgaattgcggttaatgatgaattaggcgcaattgaagattcagttgaacaagccattccattagttaaagtgggtggtcgaattagcatcattacgttccaatcattggaagaccgtttagtcaaaacaatgtttaaggaacaagcgacattaccagatattcctaagggattaccgattatgccgggcaccgaaaaaaccgttttaaaactggttaatcgcaaaccaatcctaccaacagaagacgagttaacggttaaccaccgggcacacagtgctaagttaagagtagctgaaaaacaaaaagaaatagactagaaggaatgattatgatggcaaccaatgcagctcgccaactaacgaccccagaaagtattccgagtcaggttcaagaacctgctcgtcaatcagcgcaacaaacaactcaaaaagtagcttattccacacttgaaaaattagccgttaccgtaatcgggattgctttttttgcaatgctagtaagcttactctcgactaaaatcgcggtggttaatgcacaacggacattagaaaataccactcaagatatgagtcaaacacgtgctaaaaataatgatttaaaacaagaaatcggggaattaacaagctccgaccgtttagatgcctttgctaagaaaaataatctgaaattaaacgaaaacaatattcggaatgtggctaaatgagaaatttatttaggacacataggagtccacgacagaatcgacgcatatttggcgaagttttattgctgattatcgcggcgatttttctgattttcatgggtcgttttgcgtacatcgccgcaaccgggcatattgcgggtgttgatttaactaaacgatcgaacaagaaatatgaaggcgactccgtgattcgggcacaacggggcacaatttatgattcatcaggcaatgttttagcacaagataccaacgcctatgccgtttatgcggttttgagtcatgattatgtgactgcggataaaaagccattatacgtagcagataagaagaaaacagcaaaggcgctcagcaagtacctcccaatgagtgaagctaatatttataagcaattgacgcctaaaaataaagctgtttaccaagttgaatttgggagtgccgggcagaatttatcactcagcattaaacgaaaaattgaaaagcaacatttgaccgggatttactttaaagaatcaccaacacgcttgtatcctaatgggacttttgcatcgcacgttgtggggattgcacaaacgcctaaaggttcagaagatagtggtagtcaagatttagttggcgtcatgggggttgagaagtatttcaacgaacaattaacaggtcaagatggctataagaatttgacgaaggattcgtatggctattcgattaatcagaacaaaaacaaagtcaaagccgctaagaacggtcaagatgtgtatttaacactagattcacggatgcaatcctatctagaaagtctgttgagtaaagttaataagaaatatcaaccggctagcatgaacgccgttttaatgaacgctaagaccggtgaaattttagcggcctcacaacgaccaacttttaatgcaagtactaaaaaaggtattggtgatgtttggcgcgatactttggtcgaagatggttatgaacctggttctgttttgaagattgcgacgttatcagctgcgatcgattcaggtcactataatccagatcaatactataaatctggttctgtgttggtcagtggtaagaaaattagtgattggcagaccgctgggtgggggatgattccgctcaaccaagcgtttgcccgctcaagtaatgttgggatggtcaaattagaacaggaaatgggtgccaagacttggaagtcctatattgaaaaatttggcttcctcaagaaaacgggtatcgaattaccaggtgagacggccggcaccttgcaatatgaacgaccacttgatcaggcgacgacttcgtttgggcaagggattaacgtcaatgtcatgcagatgttgcagatgacaagtgccattgctaacaatgggacaatgattaagccgcaaattttggcaggtgttggtcaagaacaacaaatcacaccgattaaagccggtaaaccaatcaaagccagcacggctaagaaagtcatgcaaaatatggaagacgtcgtttataaagattatgggactggtcaggtttaccagattccgggctataaaatcgcggctaaaaccgggacggcgcaaattacgggtcctaacggtggctatttaactggtgcaagcaactatatcttctcagtatcgggaattgcaccggcagatgatcctaaatacattttatatatcacaatgaagcaaccgggtaatatgacggatagtgcggaaaccattttatcgcaagtctttaatccaatgatgaaacgggcgctagagtatacgaaggaagccgaaaaagataagcaacaacaagttaaagtcgcttcggtcttgagtcaatcaacaaaggatgcgcaaaagaaactagaagcgcaaaacctaaagacaacattggtaggtagcggtaatctcgtcgtgcaacaattaccaaaagccggcagtgtcattttgccgaaccaacgggtcttgttgatgaccaacggcgcgatgacgatgccggatgttaatggttggtcaaaaaatgacttactaaaactagcgcaattaacggggatcgatgtggatatcaaaggcagtggttatgcttatcatcaaagtctagcggttaatagtttgttagacggcgtcaagcaaattaaggtacaattaaaatagtcaaataagagtggattaaaggagtttatatcatgttaacgggacaatttttaatacccctaatgagtgggtttgtgattacggtgatcttcatgccgttattcatcggttatttacggtttaaaaaagagggacaaacaattcgtgatgaaggtcctaagtggcacgctaagaaaaacggtacaccaacgatgggtgggttggtgttcatcgttgccgcagtaatttctagtatctgggtcgctatctggttgcaacaattgaccaatagcttatggatcgcattattcatcctagtactatatggcttacttggtttttcagatgactttatcaaagtcttcaaaaaacaaaaccttggtttgcgggcttggcaaaaattagctggtcaaatcttgggtggcgcagttttcttagcggtttatttccacgaaggtttcagccacgcactgaacataccgttaatcggtacaatttctagcagttggttctttagtttatttgtcatcgtgtggttggttggcttttcaaacgcggttaatttagcggatgggattgacggcttggttgctggtttggcaattgtgtcatttgcaacttatacgattattgcttttagacaaaatcaaatcgatgttgcgatttttggcttaacaattattgggggcttgattggattcttaatctttaatcataagccagctcaaattttcatgggtgacgttggttcattagcccttggtggggcgttggcagccatgtcaattctcttacaccgtgaattctcactattattaattggccttgtttatgtcattgaaacggccagtgtgatgctccaagttgcttcattcaaactattccataaacgtatctttaaaatgagtcccatccaccatcactttgaaatgtctggttggagcgaatggcgtattgatattagtttctgggtattcagcattatctgttcagcaatttatctgttaattttttagaagagggcgaattcgatgagaaccatcgcaacatatcaaaatcaatctgttttagtattaggactaggtaaaagtggcgttaacgctactaaactattattacaattaggcgcaaaagttactgttaatgatggccaagatcaagaggacacaccagcagtcgctgaattacgggcgcttggtgcaactgtcattacgggtagtcatccagttgctttatttgaagaagggttccattacctctttaaaaacccaggaattcgctatgataatccaatggtggcagaagccatcaaacgcgagattcccgtcttgacagaaccagaattggcttatgaagtttctgaagctgactgggtgagtgtgactggctcaaacgggaaaacaactacgacgactttaatcgccttaatgttgaactatcaacgtgcacaaggacatgcatatgccgccggaaacattggtattccgttgagtgaagtcgctcaaaaagcaacggccaaagatacaatggtcaccgaattatcaagttttcaattgatggggacaacaactgttaaacccaaggtagcagtcttaacgaatatctacgaagcacatctcgattatcacgggacacgtgaaaattacgtgcaagctaagatgcggatcgtccaaaatcaaacagcttctgattactttgttgtgaactgggacttaccagaattaagaaccttaagccaacaaaccaaagcgcaagttgtgccattttctagattaggcacttctgaagaaggggcctatgtcaaagatggccaactatgctttaaaggtgaagtcatcatgccagttacagatattaatgtccctggcgatcacaatgttgaaaatgccttagcagcactggcagccgctaagttaatgggccaatcaaacgaagcaattattgaagtcctaacgacctttacaggtgttaaacaccggatgcaattcgttaaagaattcgcaggccgtcgtttctataacgattcaaaagccacaaatatggaagcgacagaggttgccttgaagagtttcaaacaaccaatcgttctcattgctgggggccttgatcgtggctttacgtttgaaccattaactgatttattgaaagcccatgtcaaggcgattatcctttatggtgaaacaaagcaattgttggcacaaacggccaaagaagccggaattgaaacgattgaaattgtcgatcaactaactgaagcagtgcctgcagcttacgcggcaagtcaagagggtgatgtgatcttattatcacctgcttgtgcaagttgggatcaattcaaaacgtttgaagaacgcggcgatgtctacattgatgcggttgaacaaattacagaataaattggagatttaataatgagagtaatgatatctggcggtggcacaggaggccacatttacccagcactagccttaattgaacgtctaaaacaacgtggtttgttagatgccgtattatatgtcggaacagaacgtggtttagaaagtaaaattgtgcctgatcaggggattgattttaaaacacttgagattcaagggtttaaacgctcaatgaatcttaacgggattaaaaccaatcttaaaacaatcgaattgtttatgagcagtattaagtctgctaaaaaaatgattaaagaattcaaaccagatgttgtcattgggactggtggttatgtgtcagggtcactgttatatgccgcaagtcgtttaaaagtaccaacgattattcatgaacaaaattcagcagccggtgtgacgaataaattcttagcacggttcgttgataaagtggcaatttcttttgaatctgttagcgatcaatttccaatgcacaaagtcgttttaacagggaatccacgggcccaacaagtggccggaatggttcccaatgaacgcttaagcgaatttggtttaaaaacggatagtccaactgtcatgatttttgggggtagtcgtggcgccccaagtatcaacaaggcgtttattgatgcggtgccacttttaaacgaacgtgactatcaagtcctattcgtttctggtcaagtccattacgaaaatgtgcaagcagccttagctaatactacgttaaatagtaatttggcgtttgtgccttatattagtaatatgcccgaagtattacctgacttgaaggcaattgtcggccgggctggtgccactagtcttgctgaaattacggcattggggattccatcaattttaattcctagtccatacgtgacaaatgatcatcaaactaaaaatgcgcaaagtttagtgaaagaagacgccgctattttaattccagaaccagaattaacaggtgctagtcttgttaaagcactagatacactattcgaaacgccagaaaaacaacatgcgatggctaaagctgctaagaagagtggtattccggatgcatcagaccggattattgaggtcattgaaacgattatttaattgtagaaagaagcgtgtgacttgaaaaataataaaaagcagctcgggtcacatgatccgctacagttattaaaggtgtggcgcgcctaccagattaaacggtggaaacggcaacggcgacaacgtttaaaaccggggcgcccaacaattaccaatcaactaccgcagttaaagaaacaacggggtaaaaagattagatggcaactagtggtcattctagggatttttactttaggtagtttgactgcaacttatttcatctcaacaaaaagtgatattcaacagttagccgttaacggcacaaagtcggtacccgatcaacaggtcattaatgcaagtgggattcagcttggcgataatgtgttgtggcaattaatgcaccacacgaaagctaagcataatattcaaacgaaattacctaagattaaacaggttagcttgcaagtgagccaaatgaaccatgttgcaatcaacgtttcagagtataagacggtggggtatatgtttaagcataagcagtattacccaattttagaaaatgggactattttaaaaacgaaaatgacccagtcattagggaatagtccggtttacagccattttaaaaatgatcgttatttgaaactgggccttaagctttataatgatattcctgatagcattcaaagtgcggtttctgagattcgtttaacggcacaaaatgataatccttatcaagttcacttatatatgaatgatggtaacgaagtaattggtgatttaagaacgttggccaaaaaaattaaatattatcctgttttagtgaaacaaatggatggcaagggtaaaattgaccttgaagtgggtgcgtattcaaaattatttaagcaatcgaagtcgtaatcgcttaaataattagttaacgggcttcaaataacattctaaggctttctaaacctagtcgaaatgtggtactatttagcataggaatcattttattctaattgaatgcaaggaggttccacatatttaatggagaattcaaaaatatatgttgggcttgatgttggaactacttcaattaaagttattgttgcagaatcaatgaataaacaattaaacgtgataggtgttgggtcggcaaaatctaatgggttgagtcgcggcacaattgttgatattgatcaagcagtttccgctattcaacaagccgttcaacaagcagagcaaaaagcaaatattgaaattacacaagttgtcgcaggtattccagctaatctattacagattgaagaatgccaaggcatgatcgccgtttctgatcaatcaaaagaaataacaagtcaagatgtacaagatgttgcaagcgccgctttagtgcggaacttaccaccagaacgtgagattttaacggtcttaccaatgcagtttactgtagatggttttgacggaattaaagatcctcgcgggatgatgggtgtgcgtcttgaaatgtcaggaattttattcacggcacctaaaacaatgattcacaacttaaagaaatgtattgaaaaagcaggtcttgaactctcacaactggtcgttaatccattagcattaggtaaattagcgttatcagatggggaacaagactttggcgcaattattgttgatcttggtggtggtcaaagtaccgctgcagttattcatgatcatcaattaaaatttactgcaattgaccaagaaggtggcgaccacatcaccaaagatatttcagtggtcttaaatacatcaattgagaatgcagaaaaagctaaacgtgattatgggaatgctgattcactagttgcttcagaggaagaacaaattccaatcgaagtcgtgggtcaaacagcgcccattcaaatcactgagaagaaactagctgaaattatcgaagcacgtatgatgcaaatctttgatcgtctcaaaacggccttggataaagtcaatgcgttcgatatgccgggcggaattgtcatgaccggcggtgtgacagctttacctggaattgttgatttagcacaggaagttttcaattgccctgttaaactctacattccagatcaaatgggattacgtcatccttcgtttgcgcaagggttaagtttaattaactacatagctaacttgacggaagtggattggctggttcaaagtgcgcttggcaatgtcgagcaatttgaagcacgtcaaacagcgacgaagtcaactgctaagactcaagcgacacctaaagaagcaccacaaaagaaacataaaactgaatcaaagcatacattcgaaggcctaaaaagtttctttagtaacttttttgaatagggctagtcgttacaggaggaaaagcatatggaatattcattagatgcggaacaagaaaacaatggcgcagttattaaagtaattggtgtcggcggtgctggtggcaatgccgttaaccgaatgatcgatgaaggcgttaaaggcgttcattttatcgcggctaatactgacgtacaagcgcttgaagattcaaaagcagaaacaaaaatccaattaggacctaaattgacacgcggtttaggtgcaggttcaacacctgatattggtcaaaaagctgccgaagaaagtgaagaagttttagcagaagccttaaaaggcgctgatttaatcttcgttactggcggtatgggtggcggtactggtaccggtgcagccccagttgttgctaaagtcgctaaagacttaggcgcattaactgttggtgttgtgacacgtccatttacattcgaaggccctaaacgtggcaaaaacgctgcttcagggattgctgaattaaaacaacacgttgatacattagtcattattgctaataaccgtttacttgaaattgttgataagaagacaccaatgttggaagctttccacgaagctgataacgttttacgtcaaggtgttcaagggatttcagacttaatcacatcacctggttatgtcaacttggattttgctgatgttaaaacagtcatggcaaaccaaggttctgccttgatggggattggttcagctactggcgaaaaccggacagcagaagcaacgaagaaggctatttcatcaccattattggaagtttcaatcgatggcgcagaacaagtcctcttaaacatcactggtggcccagacttgtcattatttgaagcacaagatgctgctggtattgttcaacaagctgcaacaagtgaagtcaacttaatctttgggacatcaatcaatgaaaatcttggagacgaagttgtcgtaactgtgattgcaactgggatcgataacgatggtaaaacaccaaaacgtccagaagctgctcaaacaacaagtcaacctgtacaacctagtacacctaaacaaacaactaatgacgatcctttcggcaattgggacatgcgtcgtgaacctaatccacgcgaacaagcgaaagctactgaaaaatttgatgaagttgaaaagaaagacttcgacatcttcaaacgaacagcacaagtagacagtgacgctgtggatacaaaacaagataacaatgatgtacccccattttttaaacgacgtcgtaaataattaggaggatgactgatggctggtaaatttagtttcagtaattttttcggcatgacagaagatgaagattattcgactgatctgcaaggaaccaaaacaactgatgaagtcagtccaacatcacgtccggataatattatttcaatgaccgccgcaggcaatgctaagatgaataaaatcgtactttgcgaaccacgtatttactctgacgctaaaaaagttggtaagcatttactcgaaaataaagccgttattgttaattttacgagaattgagggtgcacaagcgtcacgcataattgattttctgaccgggacagttttcgcaattaatggtgaaattcaacgggtcggtgaacaaatctttttatgcacgccaccaaactatgaaattgacggtaatctatccgatattatcgatcaaaatgattttgattctgaggtgaactaagtgcaatttgtaatctatttattaatgttcctaatgcaagccacaaggatttatgtgggcatcatctttatttattgtctattaacttggattccaggtgcgatggattctaaattaggtcagctacttgcgagattggttgaacccttcttaggggtttttgaccggatcataccagcaattggtggtattggtttttccgccatcattgctggctttgtcttgtatttagtcgaacgtggcttagggacgattattcaaatcttagccatgaggtattactaagatggctgataacgaagctgtttatcagcactttagaaaaagtgaagcgccatttgttgcacaagttcttgattggattgaacaagcaacaactgaataccgtgcaatattaacggattttttagatcctagacaggcttacattctacaaaccttaattggtgaaaagggtgagcttaaataccatttcagtgggggctacaatgctgctgaacgacaacgtgcgttgattgcaccaacttattttgaacctgaggaagccgattttgaaatccaactctttgaaattcgttatccaattaaatttgcacagctttcgcatggtaagattttaggaacattggtcaacgctggtattgatcgaaacgtgtttggtgatatcatgacggatggtcaacggtggcaattttttgtcacaactaagatggctgactatgtggtgaatcagattacgaagattggtaaagttactgttcaccttgaagaacaagcctatactgagttgattatccccagggatgcttggcagtttgaacagctattagtcagttcattccgactagatacgattatcgcggcagtttataatatgtcacggcaacgtgctaaagagcttgttcaaggtaataaagtgaaattgaattggcaagcctttgataagcctgattttgaattagacttattagacattatttctgtccgtggctatgggcgtattcagctcaaatcaattgatggtcaaacgcgtaaagaaaaataccgtgtgacacttggtattctaagaaaataatagaaatgttgaaaatgacggagggatttcagaatggttttaacacctttagatattcataacaaagagttcggcaataagatgcggggatataatcctgatcaagttaatgactttttagaccaagtgattaaggattacgaatcagttttaaatgaaaatgatgctttaaaagcagaactaaaatcaagtgatgaaaaggtcacttactttaacgaattaaaagatgccttgaaccaatcaattattgtggcccaagaagcagccgataaagttaaagaaaatgctaaaagagaagctgaaattattcaaactgaaacagaaaagaattctaaatcaatgttgaatgatgcgactgaaaaagccaaccacattattgaagatgcaactgaacgtgctaaacaaatcgccatcgaaacagacgatttgaagaaacaaacacgcgttttccgtcaaagattacaagtgatgctcgaatcacaattggaagttgttaagagccccgaatggacagacctattatctaaagatgatttagctggtcatgaagcattatctgcagaaattgacctcacagaccttgacagcaagaagcataatctagtagactcagagacagtagttaaaccatgggatgatattacgactgatgacttttctgatcaaacaacccatacgattgttttccctgatgataagttaccagaagtagctgatgaagaagcacctgaagaaccagtcattaaggccgatactttagatgatgaaattcaatcagaagaaactcataatgactatggctataatccaatcgaagaagacgatagcgaaccattaacagacaataacaagaattaacaaattaaataacatttaagcgagccaacgactggtggaaggttggtaatgctctatttagtgtgtatcaccttgttgtttttcagatgaatcaagtagtttggaacggccaatgcccgttaacgcatcttaaggagggtctttgactctcaaaattaggtggtaccacgaagatttcgtcctatacggggcggggtctttttttgttttaaaaaattgaggagtgatttaatgcgtatcaaagaaacattaaacttgggtaagacagctttcccaatgcgagcaggtttgcctaatcgtgaaatcgattggcaaaaaggttgggccgataacaacctttatcaacaacggcaaaaattaaatgaaggtaaaccatcattcgtacttcatgatgggcctccatttgctaacggtaatatccacatgggtcacgccttaaataaaacaagtaaagatatcatcgttcgttacaaatcaatgaacggtttccgcgcaccttttgtccctggttgggatacacatggtttgccaatcgaacaagccttggctaaaaagggtattaaacggaaggaaatgagccttgttgactaccgtaaactttgttacgactatgccatggaacaagtcaacacgcaacgccaagatttcaaacgccttggtatttctgctgattgggataatccatacatcactttaacagctgatttcgaagctgaagaaattcgtgtcttcggtgaaatggctaaaaaaggctatatctataaaggtaagaagcccgtttactggtcaccttcatcagaatcaacattagctgaagctgaaattgaatacaaagacatcaagtcaccatcaatgtacgttgcgtttaacgttgttgatggtaaagatttattagatgctgacacaaaattcatcatctggacaacaacaccatggacaattcctgctaacttagggattgctgttaacccagcttttgattatgttcaagtattagctgacggtcaaaaatacgttgttgctgcagaacgtttgaacaagatgactgatcttcttggttgggaatcagttgaaatcttgaagactttcaagggtgctgacatggaattaatgacagcccgccacccattatatgaccgtgaatcattggtgatcttagggaaccacgtgacattagaaactgggactggtttagtgcatacggcaccaggtcacggtgaagatgattacaacgctgggacaaaatataagttaccagtgctttcagtcgttgacagcaaagggattatgactgaagatgcccctggctttgaaggtgtttattacgacaaagcaaacccaatggtgacagaagcgcttgaaaagaacggctcattattgaaactcgacttcttcacgcatagttacccacatgactggcggacaaagaaaccagttatcttccgagcaacagcacaatggtttgcttcaatcgatgcgttcagagatcaaatcttggcacaaatcgaaaaagttgaattcatgccagaatggggtaagacgcgtctttacaacatgattcgtgatcgtggcgattgggttatctctcgtcaacgggcatggggtgtgccattaccaatcttctacgctgaagacggtacagaaatcatcacaccagaaacaatcgaacgtgtggcacaactctttgcagaacacggttcaaacgtttggtttgaatgggatgctaaagacttattaccagctggctttacacatcctggtagcccaaatggtgaatttacaaaagaaaaagatatcatggatgtttggtttgattcaggttcatcacatcaagctgttttagctgctcgtgatgaattaacttatccagcagacttaatcttagaaggttcagatcaatatcgtggttggtttaactcaagtttaatcacgagcgttgcggttggcgaagtgagcccttataaggctgttatctcacaaggcttcgtcttagacggtaatggtcgtaagatgagtaaatcacttgggaatacaatcctacctgaaaagatcattaaacaaatgggtgcagatattatccgcctctgggtagcctcagtcgatgctagttcagatgtgaaagtgacaatggaaaacttccaacaagtcagtgaagcttaccggaagatccggaacacaatgcgctttatgatcgctaacacaaccgactttgatcctgccaaagacacagttgattacgcagaattaggctcagttgataagttcatgttggttcgcttaaacgcaatcattgaaagttgtaaagctgcttacgatgcttacgattttgccacagtttataagacaatcaatatgttcttaacgaacgaattatcagccttctacttagacttcgctaaagatgttgtttatattgatggccaaaatgatgcgcctcgtcgtaacatgcaaactgttttctatgcagtagcagttgccttgacgaagttattaacaccaatcttgccacatacagctgaagaaatctggagctacttacatgaaccagaagaattcgttcaattagctgaaatgccagaagtggcacattttgccggtgaagaagacttagtcgctacatggaatgctttcatgggtattcgtgacgatgtcttaaaagcccttgaaacggcccggatggacaaggtcatcggtaagtcattagaagctgccgtaacactttatccaaacgaagccaatgctgctttattagcttcattagatgctgacgttaaacaattattgattgtctcacaattaacaattgctgaccaagctgtagaagccccagcagaagccacacaatttgacggcgttgctgttagtgttgctcatgccgaaggtgacgtttgtgatcgttgtcggatgattaagaccgatgtcggttcagacgacaagttcccaatgctttgtgcgcgttgtgctgcgattgtcacagccaactacccagaagcagttgctgaaggtttagaaaaataaacatgatgcttaaaaaagctcagatataccgcgttattgcggcaatctgagctttttttgttcgaaaaatttgataacgattacattaatcttagtctttgttaatgtttaaacatgacttatcatttttttgataaactagaagaggaaaaattaagaaggggtgggtaaatgaggaaaggacaagttatgaagcaacatatggcattaattttaatgcaattattatcaaagaaacggcaacgaaaattaaccgtcgctgagtttttagaacaggcagaggtctcacgaacgaccttttattatcattttccaaatgggatgtgtggtctgtttagatggacattagagcaagaggtactagcactggtgaggcaggcgatttgcgccggccactgggaagagggctgtcacgagatggtccaattcattatgcgttatcctgaattttgtttaaatctctatcgtttctcggatgaaatgctgcgttgtgctttctttgaatccttcacaacggctgtctttaaacaagtacttgaaaaatatcgaccacactatactgattcggagttgaaagactttgagatcttttacagtggggcactcattaaccaaattgatcgttggtttgaaggtaatttaaaagaatctggcgaggccgttgatgtgcgcgtctgttttaatttacgtcaaatcgaacggctgatgaaataacaactgtacaaatgaagcgttttgttcgggattagaacaagacggcgtgtttgtcagtggtgatgaaatcatgatttggtaaactaagagtgtaccaaaataaagggaaacgcaacaaccatcatggaaagctcgaccaattggtcgggctttttatgatagttacgttgcaatatgattgaacgaaaaattgatttatagtcgtttgattgactgttattagactgactcttttacccgtgtaacggcctctgttaagcatttttgaatgctataataaaaaaatcttgagtattgtgataacaatggaggagtaaattatgaaagcctatcagacaattttattatcgagtatggttttaagtacactaaacacggggaccgtattagccgatacagctaatcaaaaaacaactacggatcaaacagaacggaccaaggccgttagaacttacagataaaaggatgattagcgaatgagacaattgatattagtcagtcatggtgatttggccaaaagttatttaacgagtttagatatgattgccggcgggcatgataatgtaacggccatcaccttcgattgtgaaattagtaagacgttattaggtgatcaaattgaagttgcgcttaaaccagatgcacaagaccagatgcacaagaagtgataatcgttgttgatttaccaggcgggatgccatgtaatgtcgtactagaacgctatttaacagatgagcgcatcacaattttagccagtttgaacttaccaatgattttagagctttatttaaatcttggtcaggcagattatcaaatgtcacaagtgattaaaacggctatttgtaatacctatgatgtgaaacaacaactcagtaaccagactgaagacgatgaataaaactaaaaagagcaagccaaacatctggaaaagatgaggggcttgctcttttttgatatgtcaatacaaagtaaaactttaatctgttctcattagcttatagttcattccccttcccatatgcgttatactaatagtcagtaactaatctgagcaattcattaagaggaatttaaatgcgtaaaaaactagtcattactgaaaaaccgagcgttgctaaagagcttgccaaggttctcggtactaatcagaaaactaaaacctattttgaaggcgatcaatacgtaattacatgggcgtttggtcatcttttatcattacaattaccggaagatattaaaaaagagtggcaacaatggcgtttagaagatttaccaatcattcctaagcatatcgggcttaaaccacttcctaaaacgggtgggcaattaaaggctatcagccatttggcgcatcgtcaggatatttcaggggcagtcattgcgactgattctggccgtgaaggggaagctgttgcccgttatattttggaatggattaaatttgataagccagtcgaacgactttggatttcatcacaaacgaccaaggcgattaaagacggttttgccaatctgaaaccagctaagcagtttgataatttgtacgcttcagcgcttgcgcggggccatgcggattggttgattggcttgaacgtcacgcgggccttaacgacgaaatatgaagataatttgtcagcagggcgggttcaaacaccaacattggcttttgtgaacgaaacagcgcaacaaatcagtcgttttaaacctgaaaaatattacacaattcaattgaaagttggccaagaacaagccacgctccaaatggctaaaccacagggcttaaaagaccgtgcgcaagccgaaacgctagtcgctaaattgaagcaggcacaaggtaaagtgggtagtgtcaagacgagccaaaaatcacaagctgcaccactgccttatgatttgacggaattacaacaagttgccaatgcgatgtacggcttgtcggctaaaaagacgttgtcattgattcaatcattatatgaaattcataaagttgttagttatccgcggacggattctaaatatctttcaacagatattgaaggcacattgaaggaacgtttatcggccttagtgaagtttgatccgcgcgccaaacaatacttagggcagggcgctaaagtgaaacaaccggctgttttcaacgatcgaaaggtcactgatcactacgccttaattccaaccgaagaaccagtcagagctgaaaaattatctaccgatgaattgcggatgtaccgtttaattgtcgaacgctttatgggcttgtttgcggatcaatatgtcacagccgttacaaaagcgactgttcagtttggtgatcacacctttaccttcaaacaaactaaagtcgttcaacaaggttggcacgcggattcaaaagaaacaccaactacaagtgttgattggcaagaaggcgcagtggtgcctgctgacttttcaattaaggaacaattaacatcagcgccgaaatccttaactgaagggaccttattaggtaagatggaacactatggcttgggcacaccagcaacgcgggccgaaattatcgaaaaattggtgcgtagtgaactcttagaacgccgtggccattccttagcagtgacacctaaggggcaacaactgttgaaattggttaataaaacattggtctcaccagaattgaccggtaaatgggagaattcattagaggcgattgcgcgtggtcaagaaaatcaaaaagcgttcatcactgaaatcgaagcggccactaagaccttggtttctgagattaaaaagagtgaaactgaatatcacgatttcgcgattaccaacaagaaatgtccagaatgtgaccatccgttgaaggagcgtaatacgcgtgacggcaaggtttacgtctgcacaaactgtcattatcggcgtcgtaaagatcccaaagtttccaaccatcggtgcccacaatgtcataagaaaatggtcatcattgaaggacaagccggtgcttatttccgttgcttgaatgatggaacgacagaaaaaatgctcgataaaaaagattgtaagaagaaaatttcaaaacatgaagaacgccgcctaattcaaaaagtaaaccaagaagaagagccagctgaaagtccactagcagcagcattgcgcaaggcaatggagaaataacggattcaaaaaaagtatgcggttaatatttgaatataaacataactcgtatataaattagtattatttcaatttataaaaagaagcagtccccgttagaaaacctaaccgtggctgcttcttttttagaatcgatttttgatattattgacggtattttctgtcccttttacaatcggatgattatcttttacttgaatgttggcatctaagtgagaacgaccggttgcgtagtcaaaggcgacgccgggttcgatgttccagacataatcgttgaaattaagggtgccatctgtcgagatggcttggacccagtaaccgcgggacattaattcattaccacgaaagacggttgtcactttatagattacttttttattagcggccagtgcgttacggaccttttcttcgaaaatctgcattgtcttttgattactatattcggtttgagtcgccaggtttaacggattatctaaactacctggatgccccgattgaaagtgaccattttgatcaaaattaaaactaatggtgtaagcaatcaggtggccacggttttgaggtgtgatgcggcgaccgttgacgaccagtggttgattatgccaaccagtcggattccaaacttggcgtgagcgcccttcagatttccctaggttgcgggaagacagataggctgttgccgaagtggttcgattgagttgatctaattggccgtaatcgattttttcgctggtccaatctgcactagtcaactggcttttgtcgttgttgatggcaagataagcggcgctgccattttcaaagtcgcgattagcaattgcctgataatcgggactgacttgcgcctgttgcgtggtggactgtgtaacggcggggattttctgggtgatatcttgcagaatattattgcgaccacccaaataaccaatcgcaaggatggtgacggctaatagtagccgtcgcatttttttcgttttcaaaatagtgactcctaacattatctgattttactattataccgtggaatgggaataagatatggtaaaaaaagggccaggacaaaatttacttttgtcccagccccatactcattattttgaactattgcgcaatgtgagtgatgtcccaatcgtaatgacttgcggaatgacttgttccgcgtcgagttgcttaattaataattcagctgctgattggcccatttgttcggtgtagaccttgacagagctgagtgttgggaacgtgtattggcagattgacgtgtcattaaagctaatcaaactgagttgctcaggtactttgatggccgcttcatgaagggcgcgcagtgcgccaaccgccatggcgtcgttagcgatgaagagtgcttctggtaagttctcggcctgttcatgaagtaactgtgtaatgagctggtaaccagattccggtgtgaaatcgccggtgagtagccattcgggatggaagttgttttgctttttaagataatgtttgaagtgggttgagcgggggtcagtgtccaatttaacattgtcggacgtgctttcttggcccgttaacattccgattttcgttaaaccactcgccataaaatgatcgacaactgctttgaccggtgttttgaaatcggtcatgacacagctaatctcgtaatctaaggtattcatatcaacaaagacgagattgcggtttaattttttcaagcgggtaatttgacccaagctgtatttaccgatgacaatgacaccagcggcgtcataaagagtatcaaaaggatcattttggaaaaaccgagtgacttcaaaaccgagttcttgcagcttcttttcaacgcccaggcgaattgatagatagtagagatcttccaattcttctgtagcggtataccattcgacaatcgcgatgcggccccgatggttattattttttttagtatttttagtgtagctaaggctttcagcggcttcaaaaatgcgttggcgggtttcatcacttacagaaagggattgatcgtaatttaaaacccgggagacagttgcgtttgaaactttagctaattgtgcgatatctttaatagttgccaaggtgcacctctcaattcagtgtttactactatctagtttagcatactacccgaaaataatgcgcgcgttaaaaaaatagtttgattttttagtaaatgtttagtaaaatgaaagcgattaataaaggaggaatttaccatgaacctgacagaattgaataccgcatttaaagcagcctacaacaaggaacctgaagcaagttactttgcccctggtcggatcaacttaattggtgaacatacagattataacggcggccacgttttcccaacagcaatcacattagggacatacgcagttgttgctaaacgtgaagatcaaacaatcaatcttttatcaggtaacttcgaagatgctggtgtcatttcatttgaccttagcgatttatcatatcaaaaagcacacaactgggccaactatcctaaaggcatgattgtttacttacaagaacaaggttatacaatcgatcatggtttggatatttatttaaaaggtaatattcccaacggtgctggtttatcatcatcagcttcaatcgaattattaatgggtgttattttagaagaccaatttaacttagatatcgaccgtgtggaccttgttaaaacagggatgatggttgaaaataaatttatcggtgttaactcaggtatcatggatcaattcgcagttgggatgagcaaggctaaccacgctattttacttgataccaatacattggattatgatttggtcccaatcgacttacaagacaacgtgatcatcattatgaacactaacaaacgtcgtgaattagctgattctaaatataacgaacgtcgtagtgaatgtgaaaaagcattagcgattttacaaactaagaatgatatcaactcattaggcgacttagataacgaaacatttgatctacaaacatacatgttacaagacgaaaacctattaaaacgtgctcgccatgctgtatctgaaaaccaacggacaatgaaggctagagaagccctcaagaacaatgaccttgaacgcttcggtaagttagtgaacgcatcacacgtgtcattacaatttgattatgaagtaaccgggattgaattagatacattagttcaatcagcttggcaacaacctggcgtcttaggcgctcggatgactggtgctggctttggcggttgtgccattgcgattgttgcaaaagaccaagttgaaaactttgaagaaaatgttgctaaggcttatacagataaaattggttatgccccaagcttctatgtcgcagaaatcgctgacggtgctaagaagttaggttaatcattaaattaggaggggtttcaatatgtcaattctagtattaggcggtgccgggtatatcggttcccatacagttgatcaattaattgaacgcggttatgacgtcgcagttgtcgataatttagttacgggacataaggcagcgattaacgccaatgcccgtttttataagggtgacgtacgcgataaagaatttatgcgcaacgttttccaacaagaagacgttagtggtgtcattcactttgctgccttttcaatcgtgccagaatcaatgcaatcgccattaaaatattttgacaacaatacttatgggatgacggcgttacttgaagtgatgaacgaattcggcgttaaacggatcgtcttttcatcaacagcggcgacttatggggaacctaaggcaattccaattaaggaatccgacccacaagtgccaactaatccttacggtgagagtaagttgatgatggaaacaatgatgaaatgggccgataaagcttacggcatcaagtttgtcgccttacgctatttcaacgtggtcggtgctaaaccagatggttcaattggtgaagatcatcatccagaaacgcacttgttaccaatcgtgttacaagttgctgctggcaaacgtgatcaattatcaatctttggtgacgactacgatacgccagatggcacaaacgtccgcgattacgtacacgtattagatttagcggatgcgcacatcttggcctttgaatatctcaaagacggccatgatagcaacgcctttaatctgggttcatcaactggcttttcaaatatggaaattgtcgaagctgctcgtaaagtgactggcaaggcaattcctgtgacaatggctcctcgtcgtgccggtgatccaagtacattgattgccgcaagtgacaaagcgcgtgaaacgcttggctggacccctaaatatgacaatatggaagcaattattgaaaccgcatggaattggcacttaaaccatcctaatggttatgcagatcggtagaggaaagaatatgcaagcaagagaattgattcaaaagtttattacaaaagtcagcacttttccagaaacaacttatacggctgaagatgaacaatatttatttaacgttgtcctcgacttagttggcgaaggtgatgaaacaccagttgttgcacaagagacgacaactttgattgacttgaaagaagcattggtccaattggcagttgaccatcagcgtattcaagatttagcggctgaacgcgatattttgggcgctaagttgatggatttggtgacaccattgccaagtgccgttaacaaacgtttttggacgttatacgaaaaggatcccgaaaaggcgttggcttatttctacgaattaagccaagccaacgattatatcaaggttgccgcaatcgcgaagaatatcgcttatgatgtccccactaaatatggcgatttagaaattacgattaacctctcaaagcctgaaaaagatcctaagcaaattgcgttagctaaaacgatgaaacaaacgggttatcctaaatgtcaactttgtttagaaaatgaagggtatgcgggtcggttggatttcccagcgcggcgtaatcatcgcattgtgcgctttgatttagaacaacaaacatggggcttccaatattcgccatatgcttatttcaatgaacattcaatcttcttggatggcaaacacgaaccaatggtgattgatcaaaccacgtttaaaaacctactacaaattgttaagcagttccctggctactttgccgggagtaacgctgatttgcctatcgtagggggctcaattttaacgcatgaacattatcaatgtggccggcatgattttccaatggccaaagcaccaatcagcacaccacttcaatttgcgggttatgatgatattcaagccggaattgttgaatggccaatgtcggttatgcgcttgacgggtagtgatgctaaacgcattgaaacacttgccgctgatattttgactaagtggcaacactacagtgatccagaagtccaagtcttagcgcaagaagcagacgggacaccgcatcacaccatcacaccgattgcgagaatgcgtggggatcaatatgaaattgatttggtcttacgtgacaatcaaacatcgccagaacatccagatggtatttatcatccacacgcagatgtccaacatattaaaaaagaaaatattggtttaatcgaagtcatgggtttagcgattctaccaccacgtttgaagtctgaaatggcagaagttgaaaaatacctctgtgatcaaccaaatgaaatggccgcttatcacaaaacatgggccgaccaaatcaaggctgatcattcagcaatcacaccagccaatgttacaacattggttcaaaatgaagtcggtaaagtcttcatgcgtgttttagaagatgcgggtgtcttcaagcgcgatgcaaaaggacaagcagcatttatcaaatttacagagcgtgtcaataacgcctaaaaagcgttgctgacaacctgttaaaaatcaattggaggtcaagtcatgaaatattggcgtcaggaatttgggacgattaatggtcagactgtttggcaacattggttagaaaatagtcagggctatcaattagcagttatcgattatggggcaaccatcacgaatttagtgatgcccgataaggcgggacaatttaaaaacgtggtgatcggttacgataatttagcggattatctcaaacaagaagcttactttggtgccactgttggccgggtagccggtcgaattggtaaaggggccttcacattagacggccacgattatcaattaccacttaataacggcgaaaacaccaatcatggtggtcctaatagctttgaatctcaagtttggcaagcaagcgttgaagaacaagccgacgcaattagcgttacttttaaattaacaagtcctgacggtgccaatggcttcccagggaacctgtcagttgcgacgacttataccttgaatgaaaagaatgaatggttggttgattaccaagcaacatccgaccaaacaacgcttttcaacccaacttgtcatgtttacttaaacttaaccggggatttcgatcaattagttgacggtcatcaattgcaaatcgacagtgatcgtttcggcgaaattcaacccgatggtctaccaaccgggcaattattgccagttgatcaaactgtttttgatttacggcaaccacgcgcaattgctgatgcttttgccagccaagaaacacaaaatcaattggtaaacggctatgatcacccattcttattaaataaaaatgctgatcgaaatgacgcgattttaaccgaaccaacgagtggtcgctcactaacgattaatacggaaggtaatgcaattgtcatctacactgccaacggtttcggaagcgaaccaaacttgactgataaagcgattcaaccacacgaagcggtcgcaattgaagcccaaatgatgccagatgcaattcatcatgcggactttggtaatgttattttaaaggccaacgaacagtaccatcggcaaacatgttacaagttaaattaatcagagtttctgattgcatgcggttacaaaatcacgtataatgaacttgtttagaagaccaatacggttggctagataatatagtgtattttaaaggagtaacatcatggaaaaaggaacagtaaaatggtttaacaatgaaaaaggttttggttttatctcagttgaaggccaagacgatatcttcgtacatttcagtgctatccaagacgaaggcttcaaatcattagaagaaggccaagccgtagaattcgacatcgttgaaggtacacgtggcgcacaagctgctaacgttaaaaaactataatcttaaaaaagattaatgatactttgaagaaggtgccggactgattagtctgtggaccttctttttaatagattgatgataattagattgacaagcagggttaaatcgattaacgtataaccatagttaaatatcaatgaccgcgtaatgagtagagaataagccactatatcagagagctgggattgctggaaaccagtatatgcttagaatcgaattacaatacgctaagtggtcagacgtgtgattgacgtaccaatcaatgagtgatgctaggcaactagcataattcgggtggtaccgcgaacttaaactttaagtcgtccctataatcttctcacgaggattatagggactttttttattatattaggagggtttcaaatgcaaaagaatattattgatgaattaacatggcgcgacgcaattaaccaacaaacagatgctgacggtttacgtgaattaactgaaaagaagagtatctcattatactgtggggttgatcctactggcgatagtatgcatatcgggcatttaattcccttcatgatgatgaaacgtttccaattagctggacatcatccatatatcgttatcggtgggggaacaggttcaatcggcgatccaagtggtcgtaaatcagaacgtcaactccaaacaatggaaatggtccaacacaacgttgaagctttatctggccaaatgaaacgtttattcggcgaagatgccaatgtttcaatggttaacaactacgactggttatcaaaaatttcattgttagatttcttacgtgattacggtaagttattcaacatcaacacaatgttggctaaagacgtggttgctagtcgtttagatgttgggatttcatttactgaattcacataccaaatcttacaatcagtcgatttcatgcacctttacaaagcacacgatgtgcaactacaaatcggtggtgctgatcaatggggtaatattacttcagggatcgatatgattcataaaattgaaggtagcgaaacagaagtctacggcttaacaattccattgatgctcaaggctgacgggacgaagtttggtaagacagctggcggtgccatctggttagatcctgaaaagacaaccccatatgaattctaccaattctggttaaaccaagatgaccgggatgttgttaaatacttgaaatacttcactttcttagatgaagctgaaattaacgaactcgctaaaacagttgaaacagcccctgaaaaacgtgaagcacaacgtcgtttagctgaagaagtgacacgttttgttcacggccaagctgaattagaaggtgctcaaaagattacggaagtacttttctcaggtgatatcaaagccttagatgtcaaagaagcagaacaagccttccaaaaagcaccaacagttgaaatcacagctgaaaagaaaaacatcgttgatttcttagtggatgctggaattgaatcatcaaaacggcaagcacgtgaagatgtgcaaaatggggccatcacaattaacggtgaccgtctccgcgaaacaacacttgaaattgacccaagcgaaaacttcgaaggtaaatttgtcattgtccgtcgaggcaagaaaaaatacttcttggcaagagtaaaataagtgcgttcaggcttggtcaacttttgagcattaacacaaggaagcgaattagcgacatagtcgatgatttgattcacagcgctaagcgcagaaagttagcttgaaaagcacgttaaataaagtgagtgctgactcgagttggttaggctttgaggattaacgtaaaaagaatattatggtattttttaccataatactcttttggtagttaaccggaaaaggctactcgagaagcacgttaaaaatcacccccaaccctcttttcgagcgttcaggggtgattttttatatttaattttctgaaagaagggtatacttattattaaataaattgaaaagaaagaaagtgacttacagatggcgttaagttatgcagataatccgcaggttcaaaagaatcgttggcggatattaacggcggtggggctttttaccttcatggccaccctcgatgggagtatcgtcaatattgcgttacctgtcatgagtcgggatttgaaaattccgatgaatcaatcagaatggatcgtctcgatttatctgattatgatttgtgcactactgctattatttggtaaagttggcgatgccttcgggaaagttaaagttttcaagattgggactcttcttttcgtattgggctcattactatgtgggtttaacggtggcctaccattgctacttggtgcgcgggtcgttcaagcgctaggagcttcaatgacaatgagcaataataatgggattatcaccgaagttttcccattaaaagaacggggccgagcattaggcttaaccggttcatttgtggctttaggcagtatcgcgggtcccgggattggtggtttaatcctcacacactttagttggggctatattttctggattaacgtgccaattggtattttaacgattatttttgggcattttattttacccaaagatattattaaaacacatgaaaaaattgattctgccggatttgtcagttttgcggccttgattgtcagcttgttccttggcatttttatcggtcaacaaattggctttatatcaccaatcattttaacggcttttgtggtagccttgatcagtgctgggatttttgtttggatcgaacaacatgttgaacagcccttattatcatttagattattcaagaatattgattttagtttaagtttactatgtgcatttttaatttttatcgttaatttcttctttaacgtcatttcaccattctatttggaaaatgcattgggcttagcgcctaatttagcaggttatagcttaatgattttcccaattgtgcaagtggttgtggcaccgattgctggtagtatttcagataaaattggtccagaattattaacttttgtcggcttgattttaatctcaattagccaagtcggttatatgttgatgaatttacaaacgccaatttggttattcatgttcttcgtcggtttagtcggactgggcaatgggattttccaagcgcccaataacacgatcgtcatgagttcagttggggtccaagatttgggggttgccggtgggattaacgccttagcgcgtaacttagggatggtctttgggatttcgctatcgacaacggtcttgtatgccgcaatgagtcgtaattacggtcaaaaagtaacggggtatattccaggtcacgcggacgtcttcatcgctgggatgtatgatgccttcatggtcgccttggttatttgtttgattgcgacagccttaacaggatggcggatgctgaaacatcgtagaatggttgttaaaaactaaaaaaataatcggtccgacaaagatgtcaggaccgattatttttttgaatcttttttagtttacattcttaggacccgggttattcgttgtttggccttgtgtgtaggctaataaatgatcacgtaagtcattttccatgtggtttaattctttttcagccatttgccgtttttcgtgaccttcttgttgaatcttcaaggtttcttgaagggtttcgactaagtcgttttgggtcttttgaagggtttcgatatcaacaacaccacgttcgttttccttagcggtttcaattgatgacatcttcaacatcgcactatttttcttcaagagatcgttggttgtttcggaaacttggcgttgcgcagtgaccgcatctttttgacggaggagggtcaaagcgattgcgacttggttcttccagagcggaatagcggtgttaattgaggcttgaatcttttcagcgagcgcttggttcgtattttggattaagcgaatttgtggtgcttgttgaagcgtaatttgacgggctaattctaaatcataagtccgcttttcaagccggttcttaaattgattgagatcgttgacctcttgcacagccatttgattgttgtcattttcggctttcgccatggcagctgggatttcagtttgatcgagtgcttgcatcttgagttgaccagcggcgatgtagatattaagtgcatcaaagtaggctttgtttttagcgtatagaccttccaatgtttcgttatcgcgcattaaaccgtctttttctttttccagtttgatcgcaattccgtcgatttgagcaccaatcttttgatacttagcagtgacttcgtaaactgattttttaatcttaccaaacatccgcttgaaaacgttgctgtcttcggcccgtaattcgtctgggttagcttcgtttagacgatacatcaatgaggtcagtgcgtcgccgatttcaccagtttcttggctttggacttgattcaacattgtttgcgaaaaagcacctagtttcttttgggcctgggcgccgtagttgagaaccgcctgttgatcgttaacgtctaattgttcagccaattgttgggcttgttgttgttgttcaggtgagagttggtttagtaattcttcacctgattttttttcaaccgtttcttcagtaacggcaggggctgcttgatcaaatgggtcttttaataaatcactcattaaatcatcttgtttttcggtaacgtctgtcattagttttcctccttgtgatcaggggttgtttgttgttttgcaactgagatttcagtgtcgagatcatctaaatcatcggccacaaaagtcgcgtagtcttgcttaatttgttggctcaaagcatcgattgcttcggcagatttatccaaaacagcgtaggtatcagccgtcttaacttcatgatgactaatctcgatgaatttgcgcgttagttcattaattgaaggtaagtgacgatagagaaaatcgctagctaagtgcaagcgtttgggttccttgacgattgcttggaacatggcttgactgacacgcgttgtttcttgatttaaatcaatcgcctttaatttaggaagagcttgcatgttagttgccaaagcttgaacttcaatttcggcttggtgcattgttgatctgaagaaatcaatctcatcatcactcatgccggcatcttgatagtgtttcagcattttatctgaaattttgtgattggttttgtattggggttgttgcttaaggcgtttaaaactgattagcatgtagatcgcagcgagtaagacacctagaccgacccacaagaagttatcccaatcgccatagaaatcaaaaagagttgcgaacgttggaattgaaactgccataattagaaagccaatacaccatatttttatttttttaaacattattgtcagctcctaaatttatattgatgagttcattttaacagtaatttcattaaaaaggtatcagcctaaggatggatatttaatcccaaccaaataatgaacttttacgtactgatagcggacgatttcaaaagcgcgtataatgattgacaagaatgcaaacttaattaaaggtggttaattttaaatgtcttatgaggaaaaggtattatccgaagaaacactttttaaagggcatgtgattgatctagcggttcaacaagttgccttgccagatggtcaaaccgccagtcgcgaaattgtctatcaccatggtgcggttgggattattccaatcacagctgatggtgagctattattggtacgacaatggcgcgcaccaatgcaacgtgaaacgcttgaaattccagcgggaaaaattgatctaggtgaaacggatttggccaaggttgctttacgagaattaaatgaagaaacaggcttaacgacggctaatttacaacaaattgctgaattttttacatcaccaggtttttctaatgaaaaaatgacgctcttttatacgacggctctaaccccagttgctaataaacgtccgttagatgatgatgagtttttgaacgttgaacgcttaacactcgcacaagcgcaagcagccgttaagagtgggctcatttgtgatgccaaaacgattatggcactatactactggcaattacaaagcaaataggagggctgacaatggctaatgaaccgagtacgcgtgaagcttaccgccaacaaaaagaggcggaagaagcggcttttaaacaacgcgatcaagaacggttaagaaccgaacgggaatatgcccgacaaaagcaaaaggcggctttcaaggctgtgaccgatgacgctccggaaaagaagcgtcggcgtgagaaaaaagaagatctcccagcagttaaacgattgaagactcgtttgaactgggcgattgggattacatttggattaattataatcgtttacttgatcttatttttcatataaactagtaaagtcgattatttttaggaaacggagaatattaatatgaaaattagtgtcgtttgtgccatggaagaagaaattcggacattgttaacgaagttagaagatgttcaagaacatacggtggcaggcaataccttctataaaggacaattgtacggtcatgaagtcacgttagttgaatcagggattggtaaagtacaagctgggatgacaacggcgattttattagccgaagaaaaaccagatgttgttatcaatacaggttcagctggtgggattggcgaaggcttacacatcggtgacgttgtgatttcaagtcaagtcgcatatcatgatgctgaagcaacggcctttggttatttaccaggacaattaccacaacaaccccaacgttttgaaggggatgctaacacagttaaacaaattgaagcggctgccaaagcagttgacttacaaccacgtgttggtttaatcgtcacgggtgaccaatttatcgccagccaagataaaatcaaagcgattaaggaaatctatccagaagccctctcttgtgaaatggaaggcgcagcgattggccaagtggcaacccaatttgggattccattcgttgttatccgtgctatgagtgatgttggtgatgaggatgccggtgtaacgtttgacgaattcatcgtagaagcaggccaaaaatcagcagcaatgctcctcaacttcttgaagaatattaaataaaaatgagtgcttttgaaacgggttgactctgagcattaacttaatttggcggattagcgatgcaatcgctgatttgacaaatgttgttaagcgcaagagtcagtttcgaaaagcacgttaaagaaagaattgcgtttgaaacgggttgactctgagcattaacttaatttggcggattagcgatgtaatcgctgatttgacaaatgttgttaagcgcaagagtcagtttcaaaaagcacgttaaaaaagaagtgtgttcaaacccgggatattccgaacactagcctaacaaggcgaatggttgctgaaagtaatcgtttgacttgtgacgctaggcaaaggaatatgggttgaaaagcacattaatcaggagtttctatggaaaaattttgtcaaagttgtggcatgccactttcaccagccaaccaaggtcgtgaacaagatggcaccaaatcaacgcaatattgccaactttgttacattgatggtcaatggacagaaccgacaattacttttgaacagatgttagctaaaggtatcgcgggtcttcgtgctgatcaaacaaccggtcaattaaaaaaatggttcttaattaaaagctatccgatgatgctcaaaaaaatgagacggtggcaataagtgaccaagtaagtctagctttgatgctaggcttattttttttggacaaaatggcaatttctgttaaactaacgtcaatatcataactggatgcggagggttaccaatgacatcagaggttgagcaatattggcaaacgtttattaaagaacaaaatttatcacctgaacggcaaccagcagaaatttattcatttggaaatacagtgcaaatggctaatgaattagcggtactagtcattagtagtcaaaaaacggcaactacttcggccattgacttgtatgaacctaatgagcatgtacctcaggctggtgattataatattatattagatggacaagggaaacccgctgcgattactaaaacaatgagctgtaaaattattgcttataataaggtatcggctgatcatgcttatttagaaggtgagggtgatcgaacacttgattattggcgagcggttcatgaacctttttttacggctgaatatgccgagttaaaccgaacatttgagccaacgattccttgtttatgtgaacaatttatggtggttaagtcttagaggagtgtgaggaaaatgattcccaaacgattatcaaaaggcgatgaaattcgggtcatcgcacctagcaatagtttacaaagtgtgggcgggtttaccgccaatcaagcggcgctcaaacgcctaaacgacctcggttatcaggtaacatttggtcaaaatgtgatggtaatggactgtcttaattcaagtccaattgaggcgcgtgttgctgatttacatgccgcttttttagatgataacgttaaagcaattttagcggtgactggtggttataatgccaacgaattattgccatatctcgattttgaattgattgctaaacaccctaagattatttgtggctactctgattttacatcgttggccaatgcgattaccgctaagaccggcttagtgacctattacggcccgtcttacatcgcatttaaattagcggatcaactcggtgattatcaagttcaaaattggcaaaaagtgatgactcagggcacggatacggttcggttgactgcatctgcccaatggtcaagtgatgcatggtacttgccggatgctaagcgcgactatcacgacaatcaatggcagacatatgccaaaggccgcgtaacgggtgagttagtggggggcaacttgaacacgctctacaccttacaaggaacgtcttatcaaccaaattatgatcgtaaaattttattgatcgagtgttcagatgattctgatcgttacgatttttcacgtaatctagcggcactcttacaaagtattcgacagccacaggcgctgattatcgggcgaatcccgacggatgttgatttggatgaagaaatgctcttatatattttagcgaaatttccaattttaaaaacgataccagtactctataatgtcaatgttgggcatacgcaaccgattctgacattaccaattggtcagacaattacggtggatgcgacggagaaatgggtacagattgaaaatgatagataaaaaaggcggtagttagatggatttgtatggcgtgttattcataataacattgatgatatttttaccggagcgttatcgagattatgtttatcttaaactaggctattatcggtatttaatccttttagggctatttttagctttaatagcgacgctcgttagcaacgaattcttcgtctttattccgatggcgattattttatcctgtttggttgcttttttagattttagaagttttaaaaaatttatgaatcgaaatgaataatgacttttgaggctgacacaaatttatttttgtgccagccttttttaataaaaaaacgcaccttcatcagaagatacgtttttagatttatatttttaaattattataactgtcttaaagctgccattagggctggttgccgttgaatttccgttagcggtaaatcattggtaatttgatggccttcgttaaaaataacaattcgcttagcgatttgttgcacctgttcgtagttatgactggcaagcaaaatgcttttgccagcctggttcagctgttgtagtagttgaactaatagtgtctgataagctgccgataagccattaaagggttcatccaaaataatcatttcgggattcattgttaagatgctccctaatgcgactaatttcttttcaccaccggatagttgataggggactcgatcggcgagtttttcgatttgaaggagttttaagcagtcttgcacacgggtttgaacggcttctttagacagacccatctgttcaggaccaaaggcgagttcggcgaaaaccgtttcgttgaagagttgcacatcactgttttgaaaaacaaagccgaccgcacgatgtaaggcggtcgtttgagccgcattttttaaaaattgatgatcaactaactggtccttaaagtaatattggccggccgttggttcgattaagccattgattaatttgaataaggttgatttaccagaaccgttgggccccataaacgcgactgcttcaccaggctgaatagtgagcgaaatatccgttaaactatctgtttgggtgtaggcatagtgaatgtgattgagttgtagcatattatttacctccgaatgaaacagaatagacaaatcaaggtgagatcccaactgattaagcgccaatcgtagcgtgtaatggttaatgatgcttgttgattaacatgaccagtataaccccgtaaaagcatcgcttgatataattcagtcatataagctcgtgcgcttagatagagtcgaccaatcaaggaaccgactaagtgctgtcttttttgcgctttaccggttgaacgcaagcgtattgcccaaagtgattcttgtaaaaattgtgctaataaatggctgtatttaagactaatttctaaagttaaaactagcagtccgggtagtttaagttggcgtaaggctaaaataaacgcaggccaggtgattaactgtaaaaaaaagccaatattgaataaaataatctcggtacgaataataaaataccaagtcgtttcagcgtgaccgagccagaaattcggtaaaattaacgcaagggcgactaaactaatgctagcgactcgctttaaaagtggtccaatttgctgacctggtaagacacaaatacggataagtgttaataatccgattagccaaatgagtaaaaagctatgtgtgagtacgacgattaaaatggtaatgagtaaactaagcaattgaataccaggtgtttgccgagttgattgatgtcggatggttggttgggcgagtcgtgacaaaatagccgtcagtaaccgtaaattttgaattaaaaaacggtcgggtttagcgaccgtttggggaattatttctgttttgttgagccaatcaggcagtttaggcgtgggttgcataatgattaatcaccagttttccaatgagatagaagataaggaccgctgtcagtgcggatagcatgtaaccaagtggtaggggaagcccttgaatcgcgtaatcgctaaagagggcattaaagtttaagccatgggccataccggtcgggaggacttggctaagatgggctgtttttaattgttgcaagagttcacttgcgtcccattcaccccaagcagtgccacttgctaataaaccaatcggtgacaaaataatcaaaccaacgataaaagtataaagggcacggtgtagttttttagttggtgttactgcggtgagtttttgaggggcagcgtaaagttcgttaggggcaacttttttgatgaattgatagaccgcaaccgtgaaaccagcttcaacccaaccagcgattaataggtgggcgaataacattgctggaatcgcaatgtgtagcggataaggggcataaagtggttgaccagctgcgtcatgggcgattaagggttgtaagccaagttcaatgcccgccattaaagccgccgcgttgatgcctagataagcaccaaggataacacccaacttttcgtgatgccatttttgaaaaagtcgataaataccataaccgacaaaaggcataacaacagccatattgaagacattagcacctagcgcgaggatcccaccatcgccaaacaagaaggcttgtgtcactaaagcaagtgtaaccgataaactggcggcatacgggccaatcaggatggcgagtaaagtagcaccaacggcatgggcggttgtcccaccaggaatcggcacgttaaacatcatcattaaaaacgacagagaagcggagatgcctagcatcggcaccgtttcttttttttcggcaacttgtagcttaaccttctttagtgccaagccaacgattggtatagtggcagcgaagaaaaaagtacaggtttgtggacttaaataattatctggaatatgcatgtgatgaaacctccatatgagtcaattgatgctgttcatgttacgcgtctcataggggttttcaatgccatttcatgtatacaaatggtaacaaacggctagttggcaatgttgtccaatagataactgacatccttaattaaaaatttgtggccgttagtttgcaagacaccatcttttttaagctgattgagcattctattaacactacttctggaactaatgccacaaaaaccagcgatatcttcgttagtgactacaaaatcaatcagaataccgtctttttgtttgattccaaataggtcgattaggttgtataagaaggcacaaagcccgccttttttaccattcatcatcattttttgcagacgataaatattttcagataattttttacgatagtaatttttaatgtagttttgcaattcaggggtggtgttaacgtagtgccagaaggtgacccgatcgatttgatagaaggttgcttcttctgattcaatccggacgttaaagggttggtcggtgtatttagagacctcatcgcgaaggagcgaaataacgtcgggttgtgcgatataagataagttaaattcacggccatcttgtaagataatcgaatttttgataatgccgtttttcaatatataggtataacgttcctctagaccatgataggtcagataagtatgtcgtttttgggtgataattgggacttgtcgatcctctaaaaaattaattagaaattcaatatcatttaaaaccataatgcgatagcctaccttaattgagattaataatcatttatacttattattcgataacttaagtcttaagtgtacgctattttaattgaacatttgttaacatttgtagccttccttttgtaacgtttaatgttgtctataaattataccgcatccttttcagaaaatctgtataactatgagcgtagcttttttaagcgttaatttagaaccgagaaaggaagtcctacagtttggtagctataaaattaccttacgatcaaaaaattattacggctaatattgcagatgctaattttgccggcaagctggtttctcaagcagccacttatcaaaatccattgagtgaggccgaaacagttgagcagtcattggataatcccattgatagtccgaagttggaagaattggcgaagggaaagaagaacattgtcatcattagttctgatcacacccgaccagtaccttcgcacattatgacccctattttattaagacggattcgttcagtggcacctgatgcacgcatccgcattttggtggcaaccgggtttcaccgaccttcaacgcacgaagaactcgttaataagtatggtgaagaaatcgttgctaatgaagaaatcgtcatgcacatctcaactgatgatagttcagtggttaaaattggccaattaccttcaggcggtgattgcattatcaataaaattgctgttgaagctgacttgttaatttcagaaggtttcattgaatctcatttcttcgccggtttttcaggcggtcggaaatcaattctaccgggtgtggcgtcatacaaaacaattatggccaaccactcaggtgaatttatcaattcccattattcaagaactgggaacttaatgcataatccagtccacaaggatatggtttacgccgctaaaacagccggtcttaaatttatcttgaacgttgttttggatgaagataaacatatcatcggttcttttgccggtaatttagaaacggcacacaaaaaaggctgtgacttcgttgaaagtctatcagaagtcgacaaaattgattgtgatatcgcgatctcaaccaatggtggttatccacttgatcaaaatatctaccaagcggttaaagggatgactgctgctgaagccacaaacaaacaaggtggcgtaattattatggtcgctggtgcacgtgatggtcatggtggcgatggtttctaccataatattgccgacgttaaagatccaaaggaattcttagaccaagcaattaacacaccacggcttgaaacggtgcccgatcaatggacgtcacaaattttagcccgaattttagtgcaacatcacgtgattttcgtatcagatttagttgatcctcaattaattaccgatatgcatatggaactggcaactagtttagatgctgccttagaacgagcctatgcaattgaaggtgcggacgcaaaagtgactgtaatccctgatggtttaggggttattgtgaaataacaatagaaagaatgagtagtttggacacaacaaatgagctacaacagctattagaagccgttgcaaaccaaaaagtcagtgtaaaagaggccaccaagcagctagcgcatgaacagaccatcgatgatttaggctttgccaaggtcgatttaagtcgccaaaaacgtaatggctatccggaagtaatctatggtgccggtaagacagccgaccaaattattggcattatcggttctttaaaacggcatgctgaaaatattctctgtacgagagtatctccccaaaagtatgcggtaattagagttgccgaaccaaccgcccattatgatgaattagcccagtgcgtcactttaatgttaaagccggtagaacaaactaagcattatattgccgttgtgacggctggtacttcagacatggcggttgccgaagaagcagccgttaccgcagaggtttacggtaaccaagtgaaacgaatttatgatgtcggggttgctggcattcatcgtctttttgaacatttagatgagattcgtgaggcccaggtcgtgattgtggtcgctggcatggaaggcgccttagccagtgttgttggtgggttgattgaaaaaccactgattgccgtccccactagcatcggttatgggacgaactttggtggactaacagcgctgatgacgatgctcaatagttgtgcttcaggcattacggtcgtcaatgtcgataatggttttggcgccggttactcagcaagtatgatcaatcatttaagtgagacggaggatgacaaatgagaacactttatttagacgctttttcagggattagtggtgacatgtttattggcgcattactcgatttaggggttgatttcaagcaatttgagaccgaattggccaagttaaatgtgactggttaccacttgcatgcccagcggatcgctaaaagcagtatctatgggaccgattttgatgttcatttgccagaaaccgtgcacaaggatgaaggctttattgaaaccacatcaactcatcatcatgatcatccacaccaacatgcagatgggcatacacatagccatggtgatgaagttcggcatttaaaggacattgaagccatcattgatcacagtgatttaagcgattatgttaaaaccaatgctaaacaagtttttacggaaattgccaaatcagaagcggttgttcacgaattgccgctaagtgatgttcattttcatgaagtcggtgcgctcgattcaatcgttgatattgtcggcgcgtttatcgcactcgaattattggcagtcgaccaagtttattcatccgaattaacggatggcagtggctttatcaaagtggcccatggaatgatgcctgttccggtaccagctgtgatgcaaatgcgagtgggcagtgcgattccgattaagcaaaacccagagattcatacggaattgattacaccaacgggaatggggattgttaagacgattgtcgatcaattctgtccaattccagacaaccaaacgattactaaagttggttatggctttggtaatcgggaaacaccacaactcaacgcattacgtgtgatgttgtgcgaaaaaaaaaactaagccaacaagttgttgaagaaaaggcagatcagatattagtgttggaggccaacattgatgatcagtcagcggaaagtttagcgccggttttggatttattgatggataatggggcgctcgatgcctttttcagtcctattcaaatgaagaaaaatcggccagctatcaaactaacggtcatgattcatccagccgatcagcaagccattacttatctgattttgaaacacacatcaaccgttggcgtgcgttaccagactatggggcgcaccatcatgccacgtcattttatgaccgtcacaacgagttatggtgatattcgggtcaaagtagttaattacgacgatattgaaaaatatacgccggagtttgacgactgtttagcagccgctaaggcctatgacgtggcgcttaatcaagtttatctcgctgtttatcagcaattaaaataaaagtgcgttgccagtggttagcttgcgagcatttgcctaatcagacgaattgccgacaaagtgagtgatttgactgatgtagcaaagcacagcaagctactggcaaaagcacgtttaaaatagtcattatttggaggaatttattcatggttcatcagttattagcagaattcatgggcacagcgctcatgatcattttcggggtcggggttcatagtgatgaagtcctcaaaggctcaaaatatcgtggctcaggtcatttatttgcgattacaacttggggcttcgggattacagtagccttattcatctttggggatgtctcaattaacccagcgatggtactagcacaatgcgttttaggcaatatctcatgggcaatgttcattccttattcagttgctgaagtcttgggtggggttgtcggtgctatcattgtctacattatgtacgccgacgaattcaaagcttcagaaggcaatgtcgatccagtcgctgttcggaacatcttctcaacagcccctggtatccgcaatttacctcggaacttcttcgttgaatttttcgcaacatttgttttcatttcatcaattatcgcgattacacaaatcaagacaccagggattgcaccaattgctgttgggttacttgtttgggcaattgggatggggatgggcggtcctaccggattcgcgatgaaccttgcacgtgatatgggtcctagaattgcgcacgctattttacctattaaaaataaagctaactcagattggcaatacgggattattgtacctgggattgccccatttgttggtggcttatgtgccgcactcttcatgcggagcttctttggtatctaatttaatcggaggaatcaattatgcgggaacaaattaaacaaactcaaacgatgatggtcaacttatttgaagtcgctgcacatgcgtcacaaccagggacaatttcaacgagtcttattgaagcacaacaagctcttttaacagcggaacaactatacggggatttagacgatgcacaacaaagtgctggtcaatcaacattcaaacactttgttgatagtgccacagatttgaatttaatgattgtcaaaagtttagataacaatgatttagcgtatgctgatcagattcaaaatggtttatcagaattaaaacaattaatttaattatatagaaagaagtctttaacaatgaatacattatctgaaaaaaaagcaatgttggctgcaagtctacaacaaatgaaaaaagtaatcgtagccttttctggtgggattgatagcacattagtgttaaaaatggctttagaaacactcggtaaggaaaatgtcttagcagtcgttgctaactcagaattattcacagacgaagaatttaacaaggcaatcgacttagcacatgaaatgggagctaacgttgaagcaaccactttaaactacttatcagatgaacatattgctaataacacaccagaaacttggtattacagcaagaagatgttctacacacaattaaaccaaatcgctgctgaaaaaggctttgatcacgtcttggatggcatgattatggatgacaatagtgatttccgtcccggcttacgagctcgtgatgaagctggtgcagaaagtgtccttcaaacagctggtttctacaagattgatgtccgtcaattagcgaaagaattaaacttgaataactggaacaaagtggccagctgttcagtttcttcacgctttccatataacacagccttaacagaagacaagattgcgcaagtcatgcaatcagaaaaattcttgcgtgatttaggttttgcaacggtccgtgttcgctaccacgaatcaattgcccgtgttgaagtgccagaagcacaaattgctgactttttaacacacagcgaacaaatcaaccaagccttacaacaagctgggttcgaatttgtcactgttgatttagctggtttcaagagtggtcggatgaatgaatcactatcagaacaacaaaaagcagccttgatgaccgcataattgaagcattattaaaagattaggggctaaccctagtctttttttagttttgaagtgtttctaccgctaataaagtggcttctatgttaaactaacatagatactttttaaaacgaggcgaaaaattttggaacatatttatttagacaacgcagcaacgaccccgattgccccggaggtaatcgagacgatgaccacgcagatgacccaagattttgggaatgcgtctagcacccatttctttgggcgccaagcacatactgttttagatacaagtcggcatattctagcgcaaagtattaatgcgaaggataacgatattattttaaccagtggtgcaactgaaagtaataacatggttattttacaaacagctcaaaaacgggctaacgaaggtaaacggattattacgacagcgattgaacatcattctgttttaaaaccaatggcttatttagaaagccaagggtttgatgtcgtttatttacccgttaacgcacaaggcgttattgaattggctgacttaaaggctgccttaacaccggaaacgattttagtaacgattatgatgggcaataatgaaattggtagtcatatgccaattcacgaaatcggtcaacttgttcacgaatcaaatgcttggttccatacggatgccactcaggcttatgggttattggatatcgatgtgcaagaagatcagattgatatgttatctgtttcagcacacaagattaatgggcctaagcaaattgggttcttgtacgtgaatgaagcgattcatttgccatcatttttaatgggtggcgaacaagaaaagaaacgccgtgcggggacagaaaatattccagccgttgctgggtttgccaaagcgattgaattgttgacaccagctgttaaggctgaacatcgcgctcggtatgctggtttcaaacaacaagtcttagaaatccttcaagcaaacggtattgactttgaagtcaatggcgcaggtagtgacgatatggtgggccacgtattaaatatgtgggttaagggtgtctcaacctatgtcttgcagatgaaccttgatttagcaggctttgcgatttcaggtgggtcagcatgtactgcaggtgatttggaaccttcacacgttctaattgccatgtacggtgaagatagcccacgagttgccgaaagtattcgaattagttttggtgttgagacaactgaagcagatgtgactgccttttgtgccgcattaactaaaattgtgcaaaaaaacttggctaagcaagccggtaaagcctaggcgcaaccgcttcatctatgctaaaatgaaactatcaatcagttgatggaggtagcaagatggctttattaaaagagacagcaacggttttaggcaatatgacacaatatgggttaagtgacgccgttaagaaatatacattacgagatactggcttcatgccaaccaataatggtaattttcaattggaacggcctcttgatcctaattcaccctttaatacagcgattaagcttaaaattactgttggtaaagaattgaagacgctcaaaatgtcggtcacttccgctgatgggttacatccagttaatatttttaaggatgaaaagaacgctgaaaacgttgaacaatttaatttcattattaatcacttgattgaacgggatattttggtagcccaagcataatcaaatgggaatgggaacgccaccaatggtcaaaattggttagggttcctttttttttgacaattgcttatgaaaagtgagtgttttggtttgaaatatgagcgaggattgctataatggtagtactggaattcacgaccttcaaatcgtagaaaactagaatctatttgaaatgatggtgatattgtggttgaccacagtaatacacgagtcgtcgttggtatgagcggcggagtggactcatcagtaacagccttattgttaaagcaacaaggttatgacgttattggtgttttcatgaaaaattgggatgatacggataaaaatggtgtctgtaccgcaacggaagattatgaggatgttgccaaggttgcttctaaaattggcattccttattattccgttaacttcgaaaaggaatactgggaccgcgtattcgaatatttcttagacgaatataagcacggtagaacacctaatcctgatgttatgtgtaacaaagaagtgaaattcaaggctttcttagattacgcaatggaacttgatgctgactttatcgcaatgggccactatgctcagatcgaacgcgatgaaaacggcattgcccacatgttgcgtggcggtgatagcaataaagatcaaacatacttcttgagtgctctttctcaagatcaattacaaaaatcaatgttcccaatcggtcacatgcaaaaatcagaagtgcgtcgtttagctgaagaagctggcttagcaactgctaagaagaaggactcaactgggatttgtttcatcggcgaacggaactttaagcaattcttaggcgaatacttaccagcacaaccaggtaagatgatgactgtcgatggtcttgaaaaaggcacacatgatggtttgatgtactacacaatcggtcaacgttctggtcttgggatcggtggcggtggcgaatcaaacgacccatggtttgttgtcggcaaagacttagagcagaatattctgtatgttggccaaggctaccataacgagttactctatgctgaccaattggatgcaagtaagatgacttggatcacaccagttgatcacggcacagatttccattgcacagcgaagttccgttatcgtcaacaagatgttggcgtaacagttcacatgacttcagagacaactgctacagttgtcttcgatgcgccagtgcgcgctattacacccggacaagctgttgttttctacgacggcgcagaatgtttaggtggcggcacaatcgacgtggcttacaaagtcgctaccgatgatgctgacaagcaagttttacaatacgtctaattaatagcactatgacacattaaaaagaagcgatgccaaagataattctggtatcgcttctttttaattgtgaattttacataatttcaagataggtgtttacaaatgttcaaaacggtgttaaactgaaagcgttaacaaaacaaggaggcgctaattatgaacttagcaaaatatatcgatcatacattattaaaacctgaggcaacaatggctcaagtagaccaaattatcgcagaagcaaaaacatatcaatttgcatctgtttgtttaaatccatattgggtgaagcgtgctagtgaggcacttcaagatagcgatgttaaagttgtgactgttattggctttcctttgggtgcaacaacgacagctactaaagtttttgaagcacaagatgccattgagaatggcgctgatgaattagacatggtcatcaatgttggtgaattgaaagcgggtcacgatgaacaagtgctaagtgatattcaagccgttgtcaaagcaggccatgctgctcaaaaacacgtgaaggttattattgaaacttgtctattatcggatgaggaaaaacgacgtgcttgtgaattatctgaaaaagcgggtgctgattttgttaaaacatcaactggtttctcgactggtggcgcaacggttgcagatgttactttaatgcgttcagtcgttggcgatcggttaggggttaaggcatctggcggtattcattcaaaagaagatgctgaagcaatgattgcagctggtgcaaatcgattaggcgcaagtgccggtgttaaaatcatgaacagtaaataaaaggagcgaacaaatatgcaattcaaacgggtttttacagttgtcttagattcagttggtattggtgaagcgagtgatgctgctaactttaatgatgtcggtgccgacacacttgggcatattggtgcgttttacggtgaacaatttaagttacctaacttacaaaaattaggattaggtaatattcgcgcatctgatccaattaagggtgtccctgcggcgcaaccagctttgggttattttggtaagatgcaagaaacttcagttggtaaagatagtatggatggtcattgggaaatgatgggtttaccagttaaagaaccacttggttttttccccaatggctttcccaacgaattaattcaaaaactagctgcttttagtggtcgttccgtaattgttaatcggccctattcaggcactgatgtgattcgggattacggcgaagaacaactggcaacaggcgctttaattgtttatacatcaggcgattccgtcttacaaattgccgctaatgaagcggtcattccgcttgaggaattatatcgaatttgcgaatatgcccggcaaataacaattgaaaagccataccgaattggccgcgtcatcgcacgtccgtttaaggggcaagacaaagaccattttgaacggacctcagatcggcatgattatacattagaaccaaccgggacgactgatatggatcgtttgaaggcagctggcttggatgtccttgcagtgggtaagattaatgatatcttttctggcaaagggattacaagcggtgtccatacagaaagtaatcacgatgggatggtccaaaccatcaaaaatgcacaaaccgatttcaccgggtttagttttacaaacttagttgattttgatgcgatgtatggtcatcgtcgtaatccagaagggtacggggccgctttaatggcatttgatcaacaattaggcgaattattagccgttttaaaacccgatgacttgttactcatcactgctgatcatggcaacgatcctggtttcagagggactgatcatacgcgtgaatacgtcccattgttagcttattcatctcgtttagcagggaatcaatcacttggtgttcgttcaacttttgccgatttaggggcgacgattttagaaaacttcgattgtccagcaggagaagttggtacaagctttttaacacaattaaaataatggaggcgttatttctatgagtacacatattgaagcccaacaaggggatattgcggaaactgttttattgcctggtgatccattgcgcgctaaatatattgctgaaacgtttttaacagatgtgcaccgctataatacaattcggaatgcatttggttatacgggttactacaaaggccaagccatttcagttcaagcttctggtatggggattccatccatttcaatttacgctaatgaattaattcaattttatggtgttaaacggttgatccgcgttggcacttgtggcggcttagggactgacgttcacgtcagagacgttgtgatcgcccaatccgcaagtacagattctgctattattcaaaatacatttggtgccggattgtattatgcaccgacggctgattttaaactcttaatgaaggcttaccaagcagcccaacaagcacgaattgcggttaaggttggtaatatcttgtcagaggatcgtttttacaacgatgaaattgatcgacaaaagttaatccaatatggtgttttaggttctgaaatggaagccgcggcactttatatgttagcagcgaagtttaacgtccaggcattagccgtgttgacgattagtaatcacatcattacaggagaagaaacctcagctgaagaacgcgaaaaatcgttcaacgaaatgataacggttgcattagaagctggtattgcttaaaacagggaagtaggggacgaaatgtatcttttagtgaatattatcggtttaattgtctttgtcggcttggcctttttattctcgaaaaaaaagtcgcagattaaatggcgttcaattggcattatgatggcaatcaatctttttctagcgtggtttttaaccggctttccgattgggcgtaacatcgttatgggggcggccaatggctttaattggttggttcaagtcgcttataccgggattgcctttgctttaccaagttgggtagctgttaagcaaatggattttgtgacgagtgtcttgttaccaattctaatgattatcccgttattcgatattttgacgtatatcggtgttttaccatggatcattaaatggttagggcgtggcttatcaaaagtaacgggtcaaccaaagttcgaatcatttttcgcagttgaaatgatgtttttgggaaacactgaagctttggctgtttcagcattacaactcaaacagatgaaaggcgaacggaacttaacgttagccatgatgtcaatgagctgtgtgacggcatccattattggggcttatacacaaatgatgccggggcaatttattttaaccgcgattccaattaatattattaacgcaattattgttactaatatcttgaatccagttgaagtaacaccggaagaagatacgattgcaacgatgagtggtagtgggtctgatacttctgacgaacaagtagacgtacaagggaaagaacccttcttttcatttttaggggattcaatcttgaacgctggtaagttagtcttgattattacggccaacgttattgcctttgtggcattagccgctttgattgataaaatcttacaattgattaacccttggattacattggaacatcttttagggattatcatgttcccatttgcttggttgatgggcttagatgttagtcatgcttttgaattcgcgcaatttatggggactaagttagtgacaaatgaatttgttgtgatgggtaaagtgacaaatacgattggcgattttgccccacattacaaggcaatcctaacggtcttcatgacctcgtttgccaacttctcaacagtcggcatgattatcggcgctttcaagggcttagtcgataaatcaaagaataatttaattgctaaaaacgttggttacttgttgctttctggtattttagtgtcattattatcagcagcgactgttggcttattcgtttggtaatttgaaagggagtttttagaaaaatggcattccaggtgggacgtaaaaatcaagtgcgaacagaaattttagcaggcatcacaagtttcttcgcgatttcatacatcattattgttaatccaatgattttaaaggatgcggggattccggctaatcttagtgtgttcgccacgattttttcatcagcaattggctgttttatcatgggactttgggctaaggccccaattgttttgacacctggaatgggcgttaatgcctttttcacgtataccctagtggttgggatgcatttgacttggcaacaagccgtggctatttcttttttcagtagtttgatctatgtcgggattgcctttacatctcttagtgagcgtttatccgctttaatcccagcatcgttaaaagcggggattacggttggtattgggctattcctagttgttttaggactcgaaaaagccgaactgattcgctcgggcggtacacagtcgttgctcgcattaggtgatttgagtcaagcaacaccactgttagcccttttagggttgaccgttacgctcgtattgtatttaagacaaacaccagggagttttatcgtcggcattttcttaatcagtgggctcgcggggatttttaaacttatcccacaagcaacaacccagattacgattagtcaaatccgtgactatccgcaacttttaatgcaaggtgattttagttctttatggacgctaaaatttggactggcggttttttcaatgaccatgatcttagtttttgaatcgatgggcttattagaaggtttattgaccgatcagcaacaatttaaacgcgcatttcaagcaagtgcggtaacgactttactctctggtttcttagggaccagtcccaccgtcgcagctgctgaaagtgcttcggggatcgaaagtggtggtcgaactggcatcacggcctttacggcgggcacattatttttaggcgcacttttctttattccgttgttgcgctttgtgccccaagcagccattgcaccagtcattattattaccggtgctttgatgatgatgcaggtccaagcaattgatttgcaagattttacagaatggtttccagcctttttaatgattgttttgatcccattaacaggttcaatttcaacagggttagcatttggtttcgtcttttatccaattgtgaagtgggcgagccacaaaacacgacaattaaattggactttagttggcttagcgatgctttttctattagaattgatttgtaatacttttttgatgtaatgaatttgatgaatagaggttcaaatcatggtagaaattgagtcgcataaaaaaacgcaacaaagtttagctgttgctaatttatattacaaagccaatatgagccaggaagaaatcgctaaaaaactagcgatttctagaccaaccgtctcacgacttttgcaatatgctaaagaaattgggattgtccggattgaaatcgttgatccttatgccagtgcgcaggcattagaagcattaattcaacaaaaatatgatttacctgaggtacacgttgtttatacggatgcctccgattaccaacaaacaattgtccaacttgggcagtatgcggcggattatctaacatcgattgttaaagacaatgatttaatcggtgtcagttggggcaagacgttaaaccaagtggcgctagcactaaaagaacaaacggctcaaaacgctaatattattgaattaaaagggagtgtcacttacaccccaacaccggtttatgccgaagaagtcctgatgaaatttggggcggctttccatacagcgccgcatgtcttgccgttacccgttgtttttggcaaccaaacgacgcacgatgttgtcatggaagatcgccatattagacggatgattgaaatgggcaagcaagcgaacatcgcgatttatacggttggcacggttcgagatgaagccttactctttcaaacgggttattttaataaagaagaacaaactgtgctgcaacaaaaagcggttggcgatatttgctcacgtttttataacacgagtggtcaagtgacgtgtgcagcgattgatcagcgaaccgttgggattcaactcgcggatttgaagacgaaggaacatagtattttagtagcaggcgggcaacaaaaaattgcggctattaaaggcgcattagcggggcactatgcaaattgtttaattattgatgtgcatacagcccaagcattgattgcccctgactaataagaaggagtgattagcatgagaatggttgatatcattgatcataagcgacaaggtggcgccctaacggcagaagaaatccaattctttattgatgggtatacagatgggacgattccagactaccaagcaagtgcgttactaatggcgatttattttaatgacatgactgatgacgaacgggcgttgttgaccatgacgatgatgcgttcgggcgaccaattagatctttcaatgattgatggcatcaaagttgataagcattcaactggtggtgtcggtgataagaccagtattccacttgcaccaatgattgcagcgttagggattccaattccgatgatttcagggcgtggtttaggccatactggtggcacattggataaattggaagcgattccgaattttaacatttcattaacagaagaggcttttaaaaagcaagtggcagagattaaacttgcgattattggggcaaccggtaatattgcccccgctgacaagaaaatttatgcactcagagatgtgactgatacggttgattcgattccgttaattgcagggtcaatcatgagtaagaagattgcttcaggcaccgatgcgttagtattggacgttaagactggttccggagcctttatgaagactgaagaagatgctaaggaattggcacaagccctcgttaacattgggcgtagtgtggggatgcaatgtatggccgttatttctgatatgaatcaacctttgggcaatgcgattgggaatgcgctagaaatcgaagaatcaatcgccatcttaaaaggagaaggaccaaccgatattacagaactaatcttaacgttaggcagtcaaatggttgtcttggctggaaaggcaagtaccttggatgaagcgcgtcaattactacaaggcgtgatcgacgatggtcgagcactcgaagcctttcgccaaatgattatttatcaaggtggtgatcctgccgttattgaaaatccaaaattaatgccacaagcacaatatcaaatcgaattacctgctaaagaaaacggttatgtgactgaaatgaccgctaatgaaatggggattgccagcatgttacttggtggtggtcgacaagcgaaaaccgatgagattgattatgctgtcggattagtcttacacaaaaaaatcggagaccccgttcaaaaaggtgagagtctattgacgatttatagtaaccgagaagacattgaagccattaaggacttgctctacgataatattaaaattggtccaaaagcgcaaaaggtcactttgattcatgcgttaattcaatagtagaatgggcgttaatgggtgagtttaaccattaacgtccttttttagaataaaatcacaatgtatcaattaaataacatataaataaccagtttggtttgtgaaatcaaataaatagcgggtcaaaattgacaatttagaactaaatagcgtacaatataattacacgctgattgcgtgatgtttcacaaaaactgacgatgaaatcgtttttatattatttaggaggcaacactatgaaagtagcagtaattggttgtacacacgcaggaacctttgcaacacaagcaacattaacggcacaccctgattgggatgtcactgtttatgaaacacatgataatttatcatttctatcttgtgggattgcgctttgggtaggtggccacgtctctgatcctaaaaaaatgttctattcaagtccagaaatgttagcccaattgggtgcacatatgaagatgcaacacactgtcttgaaggcagacttgaaagaaaaagtcttacacgttaagaacttagtgacttctgaagaaacaattgaaaaatttgataaaattattgtcacaactggttcatcaccagtgattccaccaatcgaaggtattgataatcccaacgttaaattatgtaaaaactgggaacatgctaacgaattgaagaagagtgcccctgatgtgaagagcgtcattgtcatcggttctggttacattggtgctgaattggctgaagcttatgcgacaactgataaaaaagtaaccttgattgatgctttaccacatgcactgggtaaaaactttgatcctaatatctctgagattgttgaacaagattacagagatcacggcgttcaattagccttaagcgaaaaagtagttagcttctcaggtactgatcaagtaactgttaagactgataagaacgaatacacagctgatcttgcaatcttatgtgttggtttcagaccaaatactggcctcttcaaggatcaagttgaaatgctaggcaacggtgcgattacgactgatgaatatatgcaaacatctgttaaaggggtctacgctgccggcgattcagctgctgtatactataacccaacgcaaaaagcagattacattccattggcaactaatgctgttcgccaaggcttgttaattggccgcaatatcgaaacaccaactgaaaaatacatgggtacgcaagcaacatcagccgttgaattgttcggtcggacatattctggtagtggtttgacagttgaaggtgctaaggttcgcgggatggcagttgcgacaactactttgactgaagattatcgcccagacttcatgccatcaacaacacctgttttgatgaacttaacatgggatcctaagacacgccaagttttagggggctcatttacaagtcaatatgacattgcacaagcagctaacgtcatttcaatggccatccaaacgaagatgacaattgatcaattagcaatggttgatatgttcttccaacctaactacgatcaaccattgaactacgtcaacgcaattgcaatgaaagctgtcgctgaaagtcattaatcaaaaaatacgtgagacgcttttaaaggtgctggggaaaatttttcccggtgccttttttgttataaaaaacaaccttttaataggatagacttgaatttgggcgatgactctttcataatgaaaagtaagttattttgaggagaaagtgtatgacaaccttatattttgtacgtcacggtaaaactgaatggaatttggcagggcgctatcaaggtgcgaatggtgattcaccactactggcttctagttatacggaaatcggtgagttagccgactatttaaaagacatccagtttgcccatctctatacgagtccaatgaagcgcacgcgcgtgacgtcagcaactcttaaacaagatttacaccaagattttccgatcacggtggtcgatggcctccacgaatttgaccttggtttaatggaaggcatgtattttactgaagttcaggaacggttcccggaaacgttacggactttccgcgaagcaccagctgaatatgatgcgagcgtcattaatggtgaaagcttcccgcaagtaatcaaacgtacaactgcggcgattgcgcagattatggccacggctaaaccagacgatcagattttaattgtgagtcacggagcggcattagttgccatgattcaggcgttattaaaaacacccttggcagatattcgtgcccacggtggtttaacgaattcatctgtcacaacgttaaaaacgactgatcaaggtcagtcatttgaactattggattggaacgaaacgtcctttttaagccgcacactttctgcgtcagataccatttaggagatgatttgatgaaacccgaaattttaaaaaaatgggcagctggccaacacgaagaagccgttcaacagctagtcgattatttagaaaaaacacccactgatatcgaagcgtacgtcacactagcgacttttttgacgaccctcaaagattatgaacaagctgaagtgcttttacaaaaagcgctaacacaattcccagaaaacgacgcgctccaatatgcactcgggacactctattatcaagctgaagcttatcaacaagctgagaccactttctcgcaattggtgaaggagacccaagcactagatgcgcaatatatgttggcacaaacttatcatcaattggaacaaaatgcgcgggcaatggcctttgcactcactgttcaggaaaaacaaccagatcaattagatgctaatatcctagtcggtaatattttgattagtttaggcgattttgatcaagcacaaacctactttaaaaatgcacatcgcattgatgctcaaaatggcgaagcagtcttcaaatatgggttaacgcagctagttcttggtcgagaaagccagtcatattttgaacgtgccaaaacattagattcagcatactttgaaaaaaataaacaacaactgattgatattgaaggctttatacgcgccaaagatcagaaataatagggatggcgattttggaaacagaaaatacggtcgataataaaccaaccgttaccggaacggtccaaagtgttttttacgagaatcccggtaacttttttaagattctcttgattaaaattgcccataagacaatcgattggcacgagccagagattgtcgtgactggtagttttggtgagattaaagaagacgaacgctatacgttttatggcaaagtcatcacccatcctaaatacggtcaacaatttcaagctgacaactatcaggttgaccaaccgacgactaagactggcttagtcgcctatttatctggcgaaaaatttgccggcattggtcaaaaaacggctgagaaaattgtcgataccttaggattagatgcgattgataagatcttagcggactcaactgttttagcgccgctgggtttaaatgataagaaacaagcgacgttggttgaaacgctgacgattaacaatggcatggaacaaattatcattggtctcaataattacggttttgggagctcgatggcctataacatctaccaaacttatcacgaagataccttgaagattattcaagaaaatccttatcaactagtggccgacattgccggtattgggtttaaacgagcggataatttagctgagaagattgggtttgcagccgattcaccagcgcggattcaaggggcgctgatgcaagccttgaacgaactgaccaatcaggccggcgatacgtttacccaggcgaagccgttattagcagccagcattcaattgatggaacaggcccggaacgtggcgattgatccgaatttagtggcagagcaattaatggtcttggcacacgatggcaaagtcgttggtgatgaaaatcggatttatccgaatggtttgtacaacgcggaatggcaaattgccaaccacttgatgcggattgaaaatgaacgggataaaattagttatcctaaacatgatctggataaagaaattcgccggctcgaaaaacgctttaagatgagctatgatgatgtccaaaaaaatgcaattaaattagcgatgactcacagagcctttctactaacagggggccctggtactgggaaaacaacgattattaatgggattgtgactttatttgctgagttaaacggtctttcgcttgatatcaacgaatataaagacacaccatttccaattttattggcagcgcctactgggcgggccgctaaacggatgagcgaaacaactggcttgccagctagcacgattcatcgcttattaggaattacgggacgtgaaaataatcctgatatcgatagtaaggaactagaaggcggcttattaattgtcgatgaaatgtcgatggttgatacgtacctctttagatcattgattcgagcagtgcctagcaatatgcaagtcgtctttgttggtgataaagatcagttgccatcagttggcgcggggcaagtcttttttgatttactgcagagtcaggcaattccggcaatcgaactgcaacaaatctatcgacaagacgatgagtcgacgattattccgctagctcatgagattaatcagggccaactaccagccgatctactccaaccgcaaaaggatcggagctttattcagtgcagtccttatcagattgaatcggtgattaagcaagtggtcactaaagcaaaagaccggggctttgaaacaaaagacattcaggtgctagcaccgatgtatcggggcgcagccggaattgatcaattaaatccaatgattcaaaatatcatgaatccaaaggtcgatgatcgtaagaaacaagtcagtttaggtaacgttcattatcggattggcgataagattttacatctggttaatagtccggaactaaacgtttttaacggtgaaatcgggcaaataaccgggattacgtatgctaaagatagtgatgacaagatggacgagttaacgattgcctttgatagtaccgaaattacctataaacggacggaatggcataaaattacgttggcgtattgtacgtcgattcataaggctcaaggttctgaatttgaaatggtaattctacccttggttaaccaatatcaacggatgctgaaacgaaacttgttgtatacagcagtgacacgggcgcggtccttactgattttaattggggaaccaagtgcttttgataaggcggccaaggaactctccgcaaatcggcaaacaacgcttaaggaacggattatcagcgtctttaatggcgaaaaagtgagccaagcggtcaaaaccgctagtgttggcttaacggaagctaaaccaactgttgaaaaactaaccccggctaaagcagcagcgccagaacaattggcattagtggacgatgcagatgacagcgaagaaacaattcaagaagcacctgctaattatgaattaacaccagccttggtgagtggtcatcagattgacccgatgattgggatggcggatttaacgccgtacacattcatgacaagtgctaagtagtgtataataagaaaaacgattaaataaaaatgaggcgaaacaatggctgaccagcgagctaatttagaaattagacccgtgacaatcgagtatttagaacaatttaatgacttattacgatatgttttccaggtaaccgatcaggaagtttctgatagtggttatgaagaaggcgaactagaacgtgctaaacggccggtcttagaaaaatcagatgtgattggttggtttaatggcgatgaattaatttcccaactcgcaatttatccttgtgaagttaatattcatggaaaaatttttaaaatggctgggttaaccggtgtgggcacctatccagaatatgccggccacggtttaatgcatgatttagtaaaagtcggcttagatcaaatgcggcaaaataaacaatggatttcctatctttatccttacagcattcctttttatcgtaaaaagggctgggagattatgtccgatcatctgacttatgatattcgcgacagtcaattaccaaagcaacaacccgttaacgggcatgttgaacgtttggacattgatgatgctgatgtgattatgatgtatgataaattcgcgcttcgcaatcatggcgctatgattcgcaatgagttaaattgggatgaatattggcgttgggaaaacgaagaagaacggattgccggcgtttattatgatgaaaacgaagaaccaactggctacgtcctttattggatcgctaacgaagtctttcatattaaagaaatgatttatttgaatcaagaagcacggattggtttatggaactttatcggtgcgcattattcaatggtcgaccacgttaagggcaatctctatcaagatgaaccaattacgttcctattggatgatggggacattgagcagaccatcaaaccctatttcatggcgcggattgttgatgctaaggaattcttacaagcttatccgtttgaaacggacgggcaagcattccatattgaattaacggatccactagctgaatggaataacggcacatttggtgtctattgggatgagcaaggaaaagtccatgttacgagtcggccggttggtgaaaaggtcgtttgtgatattcaaacgttgacgaccatgttgatgagttatcgacgcccatcatatttagctaaaattgaacgcctgcaagccacaaaacaaacgcttaaaaacttagagaatattattccggttgaacaaccttatttctcagattatttctaaaaaaagagccctcaatattggcagttagccataactgagggttctttttgaataattgggttatgaacggattgatatttcaataatatccgcactcgaataaataatatcaggattgcgctttgcgataaataaaggtgtttctttgatgaaatgcgttatgaacgcgacaatatcttgatggggaaagtccctaatagcaagtttattagtgcgcggtgcatccgctgctgttccgcataggacgtcatcgtctttgaggacgatctttgtgttgtcgaataacgttaatttgaccataatttaaaaccacctttcaatatttattgtatcgataagaaagcgtttttacaagaaaaacagttaacgtagtgtagtaaattatatcgctaacaattgactaatcgaatagataataacggtcattatgataacaccaataatgaataatgacgataagttaaattaaaggactagacgtcaccgctgatttcagataaagtagaggtttataggcagttttaggcataaaaactgtttcgtgatattttagaggaggatttggatgatttttttaaaagggatgctaattgggtttgcgtttgtcgcaccaattgggatgcaaaatattttcgtatttaacaatgcattgtcaaatacgacacggcgcgcggttttaaatagtttgtttatttggttatttgatgcgctcttttccgtggtggccttttatggcattggtgcgttgattattcaaaatgagattattaagtatacgattatgggtgtcggcgggctgttgattttgtggattggctatacaattttacggagcgcgcgggcggccgtcgaatttggtaaattacagccaattccgcttaaaaaagtaattttaacagccttcattgccgtttggggtaatccacaagctttgattgatggcacgttgatgctgggggccttacggggtgatatgactgccagtcaatcattaccatttattatcggcgttgtgacggcgactgctagttggttcttcggcattgccattttgtttagtatttttagagataaggtctcacctaaattcctaatgtgggttaacatccttagcgcattaatcattatcggttatggtttgatgttaattgtgaaagtggcaggtattttaatttagatcgcaaaaaacgcacatcattgatgggcgttttttttagccgttaagaacggtatgatagaagaaagtgaaaaaacggaggcattactaatggctgaattgttaaaagatatttatacagaagcatttctgacgacctttagtcagcaagttcaagaagtttatcggccctttaaagcgcaacaatttgtgagggccgttctagctgataattgggccgatttaacattgaaacaacggacacgtcagattgcgatcgtactcggtcaattcttaccacaggactattcagaagcgattgcacttttagaacaactggcacctgattgtcagggctttgcctatctttttttcccggatttcgttgttgtttatggcacacgtcctgaggattgggcgctttcaatgcacgcacttgagatttttacccaacaatcttcagcggagttcgccattcggacttttattttaacggatccaaaacgcgcaatggtccaaatgacacaatgggcgcaaagcgctaatgcccatgtgcggcgtttagcgagtgaaggctgtcgaccacgtttaccttggggagaatctttaccggtatttaaacaagatccgacaccggtcttagcgattctagaacgacttaaaaatgatcctgaactatacgttcgacgcagcgtcgcgaataatttaaacgatatcgctaaggaccacccacaattggtgattgaaacggctaaaaagtggcagggagaatccgaagcggttgactgggtgattcggcatggttgccggacgttattgcgaaagaatttcttgacggttcaaaccttatttgggtatgcagccgatagtcccgcaaacccgttagtgctatcagcaaccatcaaaacaaccgcgacaactgtagccattggtgataaattagcgtttcactatcagattcgctttagaccggaagccaagctactggttcgggttgaatacgcagtagattatgtgaaggccaatggtcaacagtcgcgtaagttatttaagctagcggaaaaagaaattgatggtcgccaaggactaagtggtgaacgacaaattaattttaaagatttgacgactcggaaacactatccagggcaacataacgtggcactgattgtcaacggacgagaagtggctaaaactgcgtttgaagtggtctgacgtgaggggtaaagcttttttgtggaaacgtgttattcacaccaactttctgcgctttacgagacttgtcaaaccggcgtctttgacgccaattcgccaagtagcgtaaatgttcaaaagtaaaccggtgtgaataacactctcttgacctttgggttaccctagggtttatacttttttgtgaggtgagaagatggctgaaaagttattgacgatttcggcatttgccaaattatttaagacaacgcagtacaccatccggcattatgaggataaggggttgttattgccagcgaaaatcgctgagaatggctatcggcaatatggtatggccgaggcctatcaattatcgtttattctatttttgcgggcattagatttatcagtagctgaaataaagttgattttaacaacggattatccagaacaaacgatgcttctgaataaaaaacaggcgctgcaacaagaaattgcccggttacaagcgttagagcgaaccgttgatgagcaattacaacaagcgactcatgacacaacttatcaggtcaatcaaacaattcatttgcgcgttttaaaacggctaccatttgcgcaagattttgatttatcggtagttgaagcaattgattggcagcccgatttgatggtccgccagctgtattatgtgattggcgaaacggattatgcgatttgtatcgcaacgcccatgccaagcgactaccacattgccgccggttgttatgattttacgacaattgaagccgctagcggcgcggaatttgatagcgccttatcagccatcacgactcatcaaaacttaccgttaattggcattgaaacgcggggtacttttttgagccctggcaaacacttagcggttaaaatactaggaaaaaggcaggcaaagtaatatgcaacttgaaacacaacgcttaatcctcagaccatttgaattgacggatgatcaagcaatctatgaatatgcaaaggatccagcgattggccccatcgccggttggccggtgcacactagcgtcgctaatagtcgcgaactcattcaaaactatttaatggcagagggaatttattcagttaatttgaaaacagcaccgcaacacgcaatcggtagtgttggtttagaattagttaaaaatggtggtggccaaccctttatgggtgagaatgatgccgaaattggctattggattggtgtcccatattggggtcaaggtttaatccctgaagcatcaaaagcgattttagcatacggttttgaaacgcttaaacttgataatatttggtgtggttattatgacgggaaccaacaatcaaagcgcgcacaagaaaaattaggtttccaaccagaattgacgattgatgaaatgtataacccactattagatgatactagaaaagaacacttcacgaagatgaccaagaaacagtggcaagcattaacgtattaaacgccaaaacataaaagacgattccccaaccatttcggtttctcccgaatgattggggtatttttttgtattttattcattttaaaaatttattgtatacgacataaaaaaatcgcgttaaatcggcttttccgccaccttatgcgatatttcaacgtaaaatatgttttaaagtcgaattgacttcaaaaaaaacatatggtattgttcatgaatggaaatgcgatacgccgtattacatttttaaataatcaatggggaggcattatgacactcttaaatacaactgagattatggcgctaattccaaatcggtacccgattatttatatcgatactgttgagtcgttagtacctggtgaagaagtggtggcaatcaagaacgtcacgattaatgaacagttcatgcgtggctatcgtcccgattcaccacagatgccaaatacattaatgattgaagccttggcacagacagcttcaatattaattctaaaatcaccagaattctttgggaagacagcttacctaggcgctgctaaaaacgttttgttccaccaaacggttcggcccggtgatcaaatcgtcttcacggttaaattaactaagaaaaaagaaaatatgggagttgtccaaaccaatgcgactgttaatggtcaaatggtttgtgaagcggagctaacctttgttgtggccccgcgtgatgatctcctcggaaaaaagtagaggttaacaaatggcctttaaaataattgaaacggcaagtgctttacccgccaacattgtgactaacgacgatttaacggccattatggaaacttctaatgaatggattgaaagtcgaacaggtattttagaaagacggatttcggaaacggaaaatacgtctgatttatgcttacgcgtagcacaaacgttattggacaagagcggtatcgcagtttcacaaattaaggcgattatcgttgcgacgatgacgccggattattacacaccttcaacagcagctattgtgcaggggcgattaggggctgaccaagcatttgcgtttgatattagcgcagcttgttccggctttacttacgcattatctgctgcgcgaggatacgtgcagacaccagatgattacgttttggtcatcggtggcgaagttatttccaaaatgctcgattggtcagaccgcagtactgccgttttattcggtgatggcgctgcgggtgtcttgttacaaggcactacctctgaccaagagagttgggtcagtgaaaagctgatcacgattggtacggaaagtgaccaattagtttcaggttacgcaccggttaaacggcctaatttcgggcaggttggtcaaacgcaagtcgggattgattttttcaaaatgaccggtaaagcaatctaccaattttcaacacggcgcgtgcctaaggcgatcgaagcggcggtcctagaagccggtttgacacttgatcaaatcgatcacttcttagtccaccaagcgaattcacgcttgattacaaaaatggctagcatgttggatcaaccgctaaccaagtttccaatgaatttacagcactacggtaatacttcggctgccagtattccactattattagcggaacaagtcgaaacaaaccaaattaagcgcggtgatttatgcgtgctctgtggttttggcggtgggttaaccatcggcattcaaattattcgttattaaaaataaactaaaaaaattaattaattataaggggttttaatcatgacacaagcagacatcttaaaaaaagtacaagcagttattgcagaacaattagacgttgaagaaagccaagtaacaccaacaacgaacatccgtgaagatttagatgcagatagcttagatatctttgaagtaatgaaccaattagaagatgacatggaacttaaattagatccagacgaatcaatcgtaacggttcaaaacgttgttgactacatcgaaaaaacaataaacaaataaagagtgcgtttgaaacggtttgactctgagcattaaccgcatttggcgaattggcgatggaatcgctgatttgacaaatatcgttaagcgcaagagtcagtttcaaaatggacatttagcaatctaaaggagcacagatgatggttaaaattggacttttaatgagcggtcagggtagcgaagccgttggaatggggaatgatttatatcaagattatcccatttaccgcgacacgattgaccaagcgagtcagctgacacaacttgatttacaaaaaatcatgaatgatgctgatttattaggtcaaacgcgttatgcacagccggcgattgtagccatgagcgttgggattagccgcatgttaacagacgcgggggtttcaacagctggtgccttagggcttagcttaggtgaatattcagcattaattgccagtggcatgtttgatttgacgaccggtttgccgctagtcgccaagcgtggtgctttaatgcaagcgactgttgaagcacatcctggcgcgatgattgcgatcttaaaacctgatattaatcaaattcaagcagcttgcgagacgattcaaaagactggtgaaacggtggcgattgcgaattataattcggccaaacaaatcgtcgttggtgggactcaaaaggggattcaggcattaacaacgttatttgaaacgcttgaagtagcgcctaaagtgattccgttacccgttaaaggggcctttcacaccgctttatttgaagaaacggcgcaccaatttgaacaagcactagcgcaagtcacttttaaagagggcgtttatcccgtgatcagtaatacaactgaacaaccttttgaagtcgctagcttacaagcaaccttaaccgcacagatgtatcaacctactcattttgcgactggcctgacacaattggctaagcaagaggtgacaacggttattgaagtggggccgggcaacgcacttagcaagtttgcacgtcaaacggtccctcaattagaccgatttaatattagcagtagcgcacagtttgaaactgtcgtggctgccttgaaagaaggcgcacattaatgacttcaaatgaaaaagtagccgtgattactggtggtagccgcggtattggtcgggcaattaccctcaaatttgcagcagcaggttatcaactcgtgcttaatgcgcgttcagcattggatgctgaactcgtccaagcaatcgaagatttaggcgtgacctatttattcgtacaaggcgatattaccgcagcagacaccgctgatcgtttggtgaaagaaacctttgaacgctatggtcgattggacgttttggtgaataatgccggtattacgcgcgataaactcgtgatggcgatgtccgttgaagatttccaagcggtcgttgatgtcaacttggtcggcacttttagagtgacccaagtggccttcaaaaaaatgttacgtcaacgcagtggttgtattatcaacctttcaagcgtgattggccaacacggtaatatgggccaagccaattacgccgctagtaaagctggcgtgattggattcacccaatccgtcgccaaagaaggcgctatgcgcaacgtccggtgtaacgcgattgcaccaggaatgattgaaactgaaatgacggcggtcttaaaaccgagtgttaaagaagcgattatgacgcagattccattacagcgttttggtcaaccagaagaagtggcatcggccgctttatttttagcagaaaatgactatttgacggggcaagttttgactgtcgatggcgggatgacaatataagtgagggattaagatgacgagagtagtaattacaggaatgggcgttgtggcacctttaggaaacgacgttgagacatttacacgccggattctagcgggcgaattaggcattggccctattacaaagtttgatgcaaccacaacgggtgtgtcattagctgccgaagttcttgattttgatccggcattacgaatcggcaagaaaaaagcaaagcgaatggatttattttcacaatacgcgcttgatagtgcactagcagcactcgaacaagccggtattaacgacgaaaataccgtaccagccgacatgggcgtcatttacggttctgggattggtggtttaaccacgattcaagaacaagtgacgcgtatggttgaaaagggtgctgatcatatctcaccactcttcgtacctaaatcaattggaaatatggctgcggccaacatcgccattgaaatcggtgcgcaaaatatttgtacaacaatcgtaacggcttgctcaagtggggctaatgcgataggtgaagcttatcgccaaattaaagaaaatcgggccactgtgatggtgaccggtggttctgaagcctcaatcaatgaaattgggattggtggcttcgcggcgttatcaacgttatcaaccgcgacagatccaacgcgggcttcattgccttttgacgcagaccgtaaagggtttgtgatgggtgaaggtggcgccactttaattttagaaagtcttgaacacgcacaagcacgccatgcgaccattttaggtgaagtcacaggatacgggaccaattgtgatgcctaccatatgacatcgcctaatccaaatggtgaagttgctgctcgtgcaatgcaaatggcaattgatgaagctgggattacagcggccgatgttgattacgttaatgcacacggcactggaacggttgccaatgagttagcagaatctgctgctttggcacgtgtttttggtgatgaaggaacagttcctgtcagcagtacaaagagtatgacaggtcatttattaggggcagccggtgcgcttgaagcaatcgttacaattggtgctttacaagccggtactttgccaccgaacgttgggttacaaaatactgatccggattgtcacgtgaacttaattaagacaccattagctgccccagacgcacaatatggtatgagtaactcatttggctttggtggccataacgctgtgttgttgttgaagaaatggagcgattagttaaatgaactacgatgaagtcaaagaaatggtggccttgtttaatcaatcgggcaaccaagaaatgcaacttgaaacaagtgatatcaaactttatttaaataaacgaggcgttcaagatgtgcaacacgcacctgtagcgccgtcagtgccacccacaacgtcaatgacaagtatgccaactgagagcactgaagcaccaatggctgttgctgatgacacaattgcgattgaagcaccgctggttgggagtatttatttacaaccagcacctgctgatccagctttcgtgaaggttggtcaaactgtagcggttggcgatgtcgtttgtgtgattgaagccatgaagatgatgacggaagtcaaaagtacggtggctgggacaattactgaaatcctcgttcaaaacgaagaattagttgaataccaacaaccactatttaaagtgaaagaaggctaaaccatgttagatagtcaagaaatccaagcgattctaccccatcgttatccgatgttattaatcgatcgcgtattgagtttcgaaccaggtgaattcgcgattgcacggaaaaacgtgtcaatcaacgaagctgttttccaaggccattttccaggtaatccagtattgccaggtgttttcattttagaagcaatggcccaaacgggggcagtcgctttattaacgcttgaccaatttaaagggcggacagccttttttggtggcgttaagtcggctaaattcagacgggtggttcgccctggcgacacacttgaaattaaagtcacacttgaaaaattaaaagatcggattggggtcggtaaagcgatcgcaacggttgatggtgaaaaagcctgtaccgcagaattaacatttattatcgaataggaggcaccacgcgatgtttaagaaagtattagtcgctaatcggggcgaaatcgcgttgcacatcattcggacgttaaaagaaatgggcattccctctgtatcggtttattctaaagccgataaaagtagtttgcacgttcaattagcggacgaagcggtctgcatcggcggtaatcgaccacaagaatcctatttaaatatgcaaaacgttttatccgcagcgattgggactggttgcgacgcgattcatccaggttacggttttctatctgaaaacagtcaatttgctgaaatgtgtgaagcctgtggcgtgacgtttatcggcccttctagccaagtgattgcgcagatgggggataaaagtcaggccaaaaccagtatgaaggcggccgccgtgccgttgattcctgggagtgatggcccattaaaaagtcttgcagacgctaaaatcgtcgccgctaaagttggttatcccgtaatgattaaagccgtcgctggtggcggtggcaaaggcattcgctttgttgatgatgaaagccaactcgctgacagttatgcgcaagcacaattagaagcggctggtgcttttggcaatgatcaattgtacctagaaaaaatcatgctggacgttaaacatatcgaagtccaaatttttagagatcactttggcaatgctgtctacttcccagaacgggattgttcaatgcaacgctttaaacaaaaggtgattgaagaaacgccgtcggctttattaaccccggatgaacgggctgaattgggcgcaattgcactcaaagcggctgaacaaattaattatgaaaatacgggaaccgttgaatttttaatggaccaagatcatcagttctatttcctagaaatgaacacccgaattcaagttgaacatccggtaaccgaaatggtgacgggtgtcgatcttgtccgggaacaaattttggtggccgcgggggcaccattatcatttgatcaagctgccgttgaaacgcgtggctttgcgcttgaatgtcgtttaaatgctgaagatccggacaataactttgccccatcggctggtacggtgaactatttatacttaccaactggtaacttaggtgtgcgcatcgatacgcatttattcagtggttatgcaatttcaccgttttacgatgcgatgattggcaagttaattacttggggcgcaacgcgagaaattgcgattgctaaaatgcatcgggtgctcaacgagttgattgtctcagggattaaaacgaatgcacagttccaacaaacgttattagaagatccggtctttttaagtagccaagcgacgacggattatttaacgtcattagcaacagattaaaaggaggggcaccatgcaattattcaatgccgttcgtaatatcggtaaagcccatcttaaatataatcaagaagcacgacaaaaggtgccagacggtttatgggttgcctgtcctaagtgtcagcaatcgatttatcataaggaccttggttattaccggacttgtccggtctgtcaatatggatttcggacgcgggctaaggttcgcctagattggttggtggatagttttgaaccagccggcgatctagcgcaaacgcctaatccgctccattttcccaaatatccgcagaaattgcgaaaagcacagcaaatcactggactagaagatagtattctgaccggtgtggcgactattaaacaacaaaaattcgcattaggtatcatggacccttattttattatgggaagcatgggtagtgcgactggtgaaaaaattacacggctttttgagctagcaactgaaaaaggcttacccgtgattttaattgcggcttctggtggtgctcggatgcaagaagggattttttctttgatgcagatggctaaaacctcagcggctgttaaacagcatgccgaacaaggactgttgtatattagcttattaaccgatccgacaaccggtggggtaacagctagttttgcaacggaagccgatattattttagccgaacccaaagcggtgattggctttgcgggccggcgcgtgattgaacagacgatgcacgaacagatcgcaccggatttacaagatgctgaaaccgtcttaaaaaatgggtttattgatcaaatcgtagcacgtcaggatcaaaaaaaggtacttcatcaattgttgaagttacatgaaagaggggctcattattaatcgtcaaaaaaagacagccgctaagattgtcgccggcgcccgtagtagtcaaaaaataacgacaccggcattattggccaacctttttgatgatttaatgattctcaaaggcgaccgagtcggcggcgaagatccagccattattggtggtatcgcgttatttaataatcaaccggtgacggtgattgcaactaataaagggacaacacttgaagaacgtatggcgtgtcactttggttgtcctgaacccgccggttatcgcaaagcactacggttaatgaaggaagcagaaaaattcaaacgtccgattatcactttggtgaataccgcgggagcttatcccggggcgcacgctgaagcgactggtcagggaatggcgattgccaataatttatatgaaatcagtactctgaaaacaccgatgattagcgtaatcttcggtgaagggggctcaggtggtgccttggcacttgcctgtggcgatcaagtttggatgaccactgagagtatgtattccattttatcgccagaagggtttgcttcaattttatggaaagatagccagcgcgctgatgaagcggcggcaatcatgcaattaacaccccaatctttacaagatgccggtgtgattgaagggattattcaagaagaaccagatgaacaccttttctgtcaaaatataaccaccgtcttaaccgaacaattaaatcaattacaacaattacctgtcgagactttattggccaatcgacaagccagatttaggcaattttaacgaaaaaaaggagtgtcagaaacgtgttaaatggaaagaaaatcctagtgatgggcgttgctaatcaaagaagtatcgcgtggggatgtgcacaagcaattacacaagctggtggggaggttatttatacctaccaaaacgaccgaattaaacatagtttgtcaaaatttgtccccgaaacaagcttattggttgaatgtgatgtcagcgatgatgccgcaattgaacaaacttttgctgaaattaaagctaaagtgggtcaaattgatgggattgttcatgcgatcgcctatgccaaccgtgaagagttagagggtaaggtttatgaaacatctcgttcaggttacttattagcccaagaaatcagtgcgtattcattaatcgccgtcgctaaatatggtcgtgacctcttaaaaccaaatggtagcattgtgacaatgacttactttggttcagaacgcgctgttcctaactacaacgtgatgggtatcgccaaagcatcattagaagctagtgttcgctatttagcacgagatttaggcgctgatcaaattcgcgttaatgccatttctgcaggggccatcaagacactcgcagtgaccggggttaaagatttccgttcattattagaagaatcagaaaaacgaactgttgatggtcaatcagtcacgattgaagaagttgggaatgtcgctgggttcttactcagtgatatggcaaccggtgtgactggtgacattatctacgttgacaaaggcgttcatttacaatagacttaatgacaatcgaggcggcgcagatacagcgggtactttccccggaactacgcgatttgctcaccctctcagttcagcaagtcctaccatcaaccaacgcttatttgttgcaacagccaatgcgtgatcagcaatggtcagtcgtgatagcacaacaacaaacacagggccgcgggcaaagagaccaccaatttgcatcaccgattggtggtctttatttaagtcttttgatgccagttagagattccgcgcagtttaatacctttcaacagacggctgcagctggtgttgcacttgctgagacaattcaagccttattacattatgaagttcagcttaaatgggtcaatgatgtctatgatcagcagcaaaaactggcgggtattttaacagagggctacctggatgtcaccggccgcttaagtggtgttgtggtgggggtcgggcttaattttgcctcaacgattgaaactgaacacattggtaacttgcgggcgctagtagtggcacagcaagtcacgattaaccaatttagtgcccagtatctcaatcgattgtatacactcttacaattaccagcccttgaactaacacgacgttatcagcgctggacgcctttggttggtcgtaagcttcaaacgattgccggacaaccagttcaagatataagtgttagtgcactcaaaccagatggtacattaattttaagtaatcaacaaatcgtgcgaattggacaacgagtccggtttgcagattaatgagcaggaggaattgcgatgtcagtatcagttgcgcgccggttaagctatatcggcgtatgtctagccttattaattgtttgtgcccagattagtattccgatttggattgttccgattacacttcaaacactagctgttggactgattgcaaccgtcttaccattacagttgagtagtgcggtcattgcggcttatctattactaggattagttggattaccagtctttgctaattttgccggtggggcgagtgttatcgtcgggccgacaggtggttatttatttggctttatcatctatattggcatcgtgcattatggtttgcattattttggccgttcacggcgcgtgatgtttagtgttaatttactcgctagcctctgtcagttattaattggcacgttgtggttgagaatagcacttcatttaggctggcaagctagtttcttaactggttttgcgccctatgtcccaattgaaatattaaaaagtgggctgattgtggcagtgattgcgcgattgccacaacgcattcagcagttccgttaatcatgaagaaagtcgccgaagaaggcggctttttttgtggtcaaaaaaagcaagatttgcataatatgctataataaaaccgttatcatattcaagtacaatgggggagtttatatgaaaaagcaaggggtattatttggtgcagcggcgctcttattattagcagggtgcagtcaaaaggttgaaggacctaagtcaacagccaaaagcagcagtacgagtcaacaagttaaaacatcaaaaaaggcgaagaaaacaacgactagctcggctaaaaaagtgagtcgtaaacaagtaacacaaacatcgtcttcagataaggcagtctggtcatcagccaagtcacaagcgttgaagacctatatggccagttttagtcaagcgatgaatcaacaatatgcggattatcaaccgggtaatgaaacccatttctttgggcttaattatccaagttactttaaagaagacaaactagctgttgatgatcaacacgtgacagctgattggtcagcagacgggactggcagcaacgattacaatgtcgtggggatttattcagacagtgcggctgcgcacgatatgtcggctcatctatatctatttacgattcatgacggccaaccggtggtcttgattacagaacaaaatcaaggcatgccagatggtcttgtgcatttcaaagaaacagccaatactgacttaaaacaaaactttgcgcaaattgtcggtggtggctcggcaacttcaacttcagaaagtaccaaagcagcgagtgatgtaaaagaaaatacgaagcaagcgggttatcaagttccagctacgttcgagggaacttggtatagtagtgatgcgactggtgaaattactaaattacaaatagctggcaataagatgattgatcctgatcatacaacggagttacacagtagttcggaaatgaatactgaagaacgtgggttagtaaacgggactattggaattaatcagaccacacccaattccgctaaaatgaattggggacgagttgatccgattaattttgatggtcgggaatggttaaccgttcacggatggtatcaaactaatggtgcaggactgctctacggtgttaaggatagggatattaatggcaagagtatgccagtgttatcaatacttgaaaccgctagtcgaagctcgtatggacactattatccaaccgaagaagcggcattagcaatgaaagatactaaattttcagatgaacataatagataaaatgttaaaaaattgcgcttatacgcaattttgattataatagcctaaaaagaaggttatgagatgttatttaaatcaactgaagctaagcgtggcgcttacgaaatgctactcaagcaacaagcagcattattagaaggcgagacaaatttaattgctaatttggctaattcttcggccttgttgaaccaaacgttaccagaaacagtttttgccggttattatttgtatcaagataatgagttagttttagggccttttcaaggcaatgtctcatgtatgcatattacaatgggcaagggcgtctgcggtgaagctgctgctgaacaagcgactgtgattgtaacggatgtgacgaaacatcaaaattacatcgcctgcgactcaacagctcgctctgaaatcgtcgtaccaatgatgaaagacgcgcaattgatcggcgttttagatctcgatagccgcgaagtcggcgcttatgatgcagttgatcaagaatacttagaacgttacgtgaagttattaatgcaagcataaaaaaacaaggtcccttttaggggccttgtttttagtttctagagtgttgcaatttgctttttgaggtggtaacaaacttgggtcacaatcacaattgccaacaaacggtccaagtaatcagttccggcttggacaagcgtgatgctcgcgaattgattgaggccgaggccactgagtagttgaacaatcatgctggaacctgaagacgtaataccgtggaataggaaataagtaatcagtgaactaacgacagtgcccggcaaagcaacgccaatggcaactaacggaatttcgcgtttactacgttgatgttggtataaaaaccaacctgctagtaagccggttaaaaggccatctggtaaatagtatagcgcgaataagtcagtcgtaataccactaagaacgctactggcagtcgccgttaatgcgccagctaagggccctagtaaggcaccggcaaggattgtcccaatactgtcgaggtaaattggtaaccgtaagacgagcgcaatgttactgccaacgtaatttaaggcgattgccaaggcgataattgttagatggcgcgttttaaattttttcattaaaggttgttcctatctgagtttttttaagtccgttttaatgattgaagcctgtgcatttaaaacgacggtcaaaaactgttcaaagaaacgatttgtatctacctcagttaaaatgaggctattaataggacggtgccaaaagtcgaagcggtccaccagtgtttggccaatactggtgccggttgtttcgacagtggtgtagctttcaaaaccctgacaaagtgtcgggtcgatgaaataggcgactgcgagcggatcattaatgacacagccgatgatatgttcatattgccagtggaaatcaaaataaaactgcgtaatagcggctaaatagtcaccaacttcaggattgatccgctgacaataagctaacaaagtgggcgtgaagacaatctcacgagtgatatctaagccaatcatttcgattttctgattgaggtgttcatagaccgccaaagcagcctccggatcactccaataattaaattccgccactggggagcaattaccatgacttttataggtgccacccatcgaaacgaaccgcgcacaattggcccccaattggggatttaatgttagcgcggtcgcaatgttggtcagtggcccgagtgcgataatactaatatcacaaggtgccttaaaagtcgtcgctaaaaaatcggctgccgattgctcagcggccttggtagtcgtttggcggggaatatgactatcgcccaaaccatccataccatgtgtatcttgagcactaacaaaggtcttcttgagtggctgggccgcaccagcgtagaccgggatatctagtcgaccgagtcgttctagacatttaaaggcattgtcgacgccaatttcgacggggacgttgccgcaaacaatcgttaaagcaacgacttctacttcaggcgattgaatggccaaattcaacgcgagagtgtcatcgatgcctggatcgcaatcaataataattttgcgagtttgcatttatttctaacctccttgagatccttagttttttattctgggaagtttccgaaccagtccaagcggggcttaggcgcttgatttcaaatgcaccatttcataataacgtgttgatagcctcctgtaaatagggggatttaagccggattgaaaaaaattaaataacttagtaaatttgagttgacattaattgtcagacttggtattataataaacgttgtaagatattgatatggagaattacccaagtctggctgaagggaacggtcttgaaaaccgtcaggtgggttctgcccacgcgagagttcgaatctctcattctccttaataaataacagataaacacctcatcggataatcgatgaggtgttttttgttttgattgcgcaaaaaaataaccagacgattgaaaaatcaatgactggttattttttgaaatgccttaattaaaagcgcttatttattgtatgttgtgaaacggtcttcaacagttgcgtattccttagcatctgctggattttcgattgagccaaatggcatttgagcgcgtagtttccagtttgatgggatattccatttagcagcaactgcttcatcaatgactggattgtaatgttgcaagttagcaccgatattttgttcagcgagtgccatccatgttgcgtattgtgtcataccatttgattgttctgcccaaactgggaagttttcagcatataatggcacgttttcttggaagcctttgataatatcttgatcttcgaagaacagaattgtgccgacaccaccagcaaatgatgctagtttagcttgtgtattagggaagtattcagcgggtgttaatggttttaaggcacttgctgtaatatcattccacaaagtattgttggcttcaccgaataaaataactgcacgtgaaccttggccgttgaaagcacttggtgtttctttgattgtcttgaagattaattctgaaacttcagcttcagttaagtcgatgttttgacctaaagcgtagattgaacggcgttgttgttgtaaatcgaataagtttgtcatatttaaaatgcccctttagaagttagtttattgataacaggtattactatatcacacttacaaaagataagtaaagtgttttgtaagcctttttttgttaattaatttatagattgttgacaatttaattgctaaaagccgttatgacgctatttatagcatatctaaatgttgggattaatatttaatttagtaatatttttttggcgattaggattattagtttcagaaagcgttttattaatcttaacggtttatgtctgggttagaatactctataataaggagctatgagcagttgtctgtagaaagtagggtgacgattaattgaaacaagttcaaaatgttattcagcaacttacagaaattagaacagcactaatgaatggtgaaatttatcaatctgtaccagaaaaagtattagccgtcatggacggtgttcaatacaaaacacggcgcacgcacattgcaattccggatgatgcggatgccgctttggcacgaattgccgcaattgaccaacaaatcaaaaccgatggtaaagcagcgcagatatcggatgaagcgttggatgatttattacggcatatggctagtccagatgcacgtgtgagagataagggtgtcttttatctctttaatcggttattacgccaaaccgttttaacgaaagaacaattattatgggttaaagatcgtttgttaagcgatgactatttattcgcccatatttttgaacctgaaaacgatggtgttttcttgcgctcatttagcgcgatgtttttggccggtgttttatacgccaatcggacgttctatcacgttttaacagaggctgagttagtggcgattgaaatgcgcgttatggcctatacggtcattgaattggattcaagagggtatgttgaaaataaaggctgggcgcacgcaatgacgcatattattaacgtctggtctgaactaaacgaaacgaccgaattacaacgggcggataaattattaatgctagtggttgtgatgcaagcttttcgcttctctgataatgcattagcgtatggtgaagacagtcatttaaccaacgtgattatcaatttaatgaagaagaatcggttatacatcgattactttttaatcgtgctgcaagaatggcaacaagcgatgttaaccattgcaccggaagaaaacgtggcgttttggaatcgttggtataaccggaatcgatttttacaatcattgctggtacagccagaattaccagaaaaaattgcggattatttacgtaaaatttctgatttattttaagactattagtgaggattgaaacaaggatgacagtaaaaggtgtaatttttgatgttgatgggatcttagtcaacagtgaaccatattattttgaacaacgcttaacatttttaaatgcaattggggcaaagttaaccgttgaagaaagtcgacgccaaattggctctaacatgaatgccgttttaaaacaggtttatccgggtagaactatgaatgactatgcgatgattaaagagggctatcgctcttataagcgtaaacatccgattcgctttgataaaattttaaatcaggatgcgcagacgctgttagccgagattgcaccgaaatatcaaatcgggttggcctcagctggtgaacgtcaaattattaatcaaatgcttgctgaaactaaactaacgccttattttgaaacaattgtcagtggtgcggagacggctcacaataaaccggcaccggatgtttatacaactgcaattgcacaattggggttaaaaagtgatgaagcagtggccatcgaagattctgagtttggcattaaggctggtaaggcggcgggattaaccgtcattgctttaaaaccgcttgacagtcaatttaaaattaaccaagaagaggctgactatcgtgttgaatctttaaccgaggtaccggctattctggcacaattatcataaaagtataatcttgaacccgagattattttttagttaatcggctaaataacgtatattaatacctgtttatcgtatataatggtaggcaggtattaagtgtcaacgggattaaataagaatgtcactggggaatttgaagatgatgaagatattaggggaaaactttaaacgaatccgtaagtcaaaaggattcacgcaagctgatttagcgcatggtatttgtacgcaagcgacggttagtctcgtcgaacgtcgtaatcaggtgccgagtacgaaaatcttaatgcagctttgtcaacgcttggaagtctcggtcgataaaattatcgtccaagaagaagatcaattacacgttttaatgcgtaaactacaagatttagcgaatgatgatgagtttgaacaggcgcatcacattattcaacagattcatagtaatgagttagccgaacctgaagattttaaacgttactactattatcaggggcagattagcttattattacaagatagtccggatgatgcactctttttcttccaccgggcttatgaacaatatgtgacgtcacgaacggatacgtatggtgttttatgtattattggtatgagtttggccaatgtgaagaagggtcaattagaccgcgcgcaaaagcaagtcgataaagcaatccgaattatggatagtgaaccgggcttaatgatgattgattttccgaatcatttgcgcatttacggcaccattgctgaaattttctgtgcattaggcgcttatccgacagcacgacgttatgtcaaagaagctatccaagatgcactcgataaacatagtttgtatctattggattatctctacttcgttttaggccaaattgaagttcaacgcgaaaacgaccaaaaagcattgcaacattttcacgttgcccaaacacttgcgcaaattagaaagcatcctttaattttgacgcaagccaacgcacaaattcaaaaattagcataaaaaaagctgaggatttaaatcctcagcttttttagtgccattaaatatcttggccaatactacttttcttcttattgagtgcatgtttattgtcgagatctgttctaaccactaaaacgtcgcaaacagctgtccgagtaacgtattccgttactgaaccgattaataatcgttcaaccgcatttagacctgtcgcaccaatcatgatgagatcgatgtcttttttctcagggacttcgcgagcgataagactcttaggtgccccatattcgatactgtaatcaacgtcggttaagccgaggtcattggcagtaacgatatattcgtccattgttttcttagctgtttcagttacttgttcgaccattgctgaatcgaaacttgaaatgttttggaaagcgcgtgtatcgataacgtgaatcaaatgtaattgaccgttgtttctaagggctacttcaactgcttttctaaaagcaagttcagcttcataagaaccatcaattgcgaccaaaatatgtttatattgttgtaacatagtcatcacctcatttagatttacaagcttattgtacgctaattcaagaacaaaagtaaaacttaaagactaccagcaaaagataatgcaacaaatccagtgactaaactagcggcaatcatggtgattagattccatgtgaggggcagtgttataaaaataacgaggcccaacacagcaattaataagagtaaccaaccggcaactagcacgcgacgacctaagcgacgattctcagcgaggttgaaaagtaaaaatgatttattttggtagtaacaaagtacaccgcctaatagagcgatgactaccaaaaataaaataaggacaaaagaaatcaaaagaaaacctcctaaaaattgtcaacaaaaaagggccaacgcaaacgttagccctgtcaaagtcattggactttgggaaatctagtggtaccgtagaagcttcccgatagttgagcccgctttaatatgcaggtgggtcagactattgttagacttggttccttcatgaaaaagtatacacttgctaacaactcgtccatcccattaacgaattacttgatcggtcaacataaggtgggaagacgcgcataccttagaaatcctactattatagtagcacgcttatgggattggtgcaacttttttgtaaccgttcacttgtggcggcttgcttgtctcagccgttcaagttgttgttttaaaacttgctcgtatttaccagttgctttggcttcgtagtaatgactccctaaaagttttgtcgggaggtaatcttgggcgacccaatcattgggatagttgtgtggatacttgtagtctacaccatgaccaagcttagcagcaccggcgtaatgggcgtcttttaaatgcgcgggcacttcaccggccttaccggcgcgaatgtcgcctaacgcattatcgattgctgtgatagcggagtttgattttggtgagagacagagatcaatcacggcaactgccaatggaatccgtgcttcggggaaacctaattgcttggcggctgtcactgcttcaacggttcgagcgcaggcttgcggattagctaaaccaacgtcttcataagccatcgtcatcaaacggcgactaatggaaggcagatcaccggcttcaattaagcggcccatataatgtaaagcggcgtcaacgtcgctaccgcgaacagatttttgaaaagccgagatgacgtcatagtgcgcatcgccatctttatcatgggtaatggcctttctttgaacgcattcctcaatgacagcaatatcaatgtcgattaaaccagtttctgggtttttaggcgtcgagcggacggctaattctagcgcgtttaaagcacttcgaagatcaccattggtgacttgcgcgaggtatttttcagccgtttcatcgagattaacgggttcatcgcccaggcctttttgcggatcagttaaagcgcgctgaatggcgacgtgaatatcggcttcattaagtgggtgaacttcaaatatctgggtccgactccgaatggcggggttgatcgtgatatagggattttcggtggtagcaccaattagaacaatccgaccgctttcgagatggggcagtaagaaatcctgttttgttttatcgagtcgatgaatttcatcgagtaataaaataacagtgccgctcattttagcttcttcagcgacaatttgaagatcctttttactatctgttgcggcattcagcatccgaaaggcgtattgcgtactaccagcaatggcgctggcaatactggtttttccggtgccaggtgggccataaagaatcattgacgagagtaatttggcatcaaccattcgtcgaatgattttttgcggacccactaagtgtgtttgacccacaatttcatcgatatttgtggggcgcatacgatatgcgagtggttgttgcatagctgtcatcctttaaaataatgtttatcattagtataacacgtgtcaaaaatttaacgacgaacaagcgttttaaaaaacggtggggatgtgtataatggggatacaactttgaataaaagaggcctcgatatgtccaatcaactatttgaacaaattcaacaattacatttagccccacttttaaattggggggccttcgggattgaaaaagaaggacaccgggtgacagccgctggacaattaagtccgctaagtcatccagcaagtttgggttctcgtgattttcatccgtacattaaaactgattttgctgaaatgcagacggaattggttagcgataccttcgataataccgacgaaatcatgcaacagctgggtgccttatcagaagtacttgagatgaatctagccgacgatgaattgatttggcccctcagtatgccacctgtattaccaagcgatgaaacgacgattccaattgcagacgtcgcaccagatgcgcgtgcttaccgtgactacttagccaatcgttatggtcgccggctacagatgatttctggcgttcactttaattttagcctggccccagccttaatcgcgcgcttatacgatgaggtctatcatgatcaatttgcaacggtgaaagattttagcgatatgttgtacttacaaatcgcacagaattatagccaataccggtatttattaacctatttatttggtgctagtccgattactgaagcactttttcaaacagatacgacgaacttgccagattatgcagtccgcagtttgcgttcaagtcaactctttggttatgccaatcatgacttggttgtctcgtttgaatcggttgctgcgtatcacgattcattggaacaggcaattagtaagaaacaattgatttcagaacgtgaatattacggcagtgttcggttacgtagtcacggccatctcgcccaaggcggtgttgattatcttgaattccgcggttttgatttgaatccattcgctgcaagtggtgtgacacaagaacaacttgatttcttacatctgttctttacgtacttattatcgttacctaaggctgttgaaagtttaacggctcgcatggcggaagggcaacaactaaatgaggcgattgcgcttgaagatgcgacgaaagcatcggcacaacaagctaatatgcaaatattgatgactaatatccgtcaatttatcacgacttatcaattggatcaacgatttattgatgcgtggacagttatgaatgaacgagttaatgatttcaaacagacattgagttatcgactagcccaagaagtccaagacgattctctaaccgcttttgccatgcagcaagcacggcaatttaaacgcgaattaaccgagaaaccattccaattacaaggctatacggatatggaattatcaacgcaaatgttaatgctagatgcctttcaaaaagggctccacgttgccgtattagatcgcagtgatcaatttgtcgaattgacctaccaacaacatcatgagttggtgaaaaatggcaatatgaccagtctcgaccgtctaattagttggccgttggtggataacaaagttgttaccaagattgtcttggccaaccaaggtattcgcgtgccagccggtgctgaatatgcggatttagaagttgctaagcgcgactaccaagcggcctttgggcaacgggcgttggtgattaagcccaagactagtaacatgggggccggtattacgacctttttaacacggccatcagaaactgattttgttacagcctttaaactcgcgcaacaatacgaccaacaggtgttagttgaagagtatatcgccggttcagaataccgtttcttagtcatggatcatcaggtgcaagccgtcttggaacgcgtgcctgccaatgttgttggcgatggccgttcaacaattacgcaattagtcgctaagaaaaatcggaatgagttacgtggtgaggatcaccgcacaccgcttcaaaatattcgcttaggagcgcgtgaacaattgattttgaaacaacaaggttaccaagtcgatgatgtgccaatgcgtgggtcgcaagtcttcttattacaaaattccaatatttcaaatggtggggattccgttgatgtgacggatgatatcgataagagctattttgcaattgctgaaaaggttgcggaaattcttaatctgaacgttaccggtgttgatatcattattcctaatttatatcaaccgtatgatcctgaacatcctgaaatggcggttgtcttagaagctaactacaatccagcgatgttgatgcatcttttcccaatgatggggcaacagcgccgtgtgacaactaaaatgttaacgatgttgttccctgaaatgcattaatttaaaaaagaataccaaaaaagccgttggcattgcccacggcttttttgtgtggttaatcgaatagacgaccgaaaagcccttcttttttaggcttttccggagtcggtactgctgatggatatttagcgctaattgcgacagtttcgcaattaatcgcgtctttggcaacgactagtaagccgattgcttctggtgcagtttgcgcagtttcgttattgaccaaagtaaattcaacttggtatttggtaattgccgcgagataattagtggccgcgtcatttttaccattcaagagaatatggtaagccttgaaatcgggtagatggctttcaaatgtcgcttgaattgcaggttggcttaattcagcattggtgatgctgagtaagacgcgttcgcgcagagagcctaaataccgacggcgttcatcaggattggtttggggcgcgccatggatcgcactatctagatgttgttgcaattgatcgttctctgacaaaatggtcacctcatttctaatttgtgctatattagaactaaacctaagtataacatgttggaggaaaaagatgtttacacgtgctgattttgaaatttttgatgacccgactctaaaggggcgtttgaataaaatttatacggaacttgatcccaaatttgaagcgtttggggcacaattacaaaatgaattggctgaggccactaaacgcgaatttacgctgcatattgccaaacatttacgccgcttcaaaaatccaccaatgaatacttggatggcgcttagcgagagttcacgtggttacaagatgatgccgcactttgaagttggcttttgggatgatcgaattttcgtttggtttgccctaatggccgagatgccagacaagacggattatgcaccactattggcgagccaatcagaaaaactcttaagtgattttactgattatgatttaagttatgatcacatgacgaaacaaaaattcccgatgtcaccggataacttacagttgatccaagacaagtttgctaagaccaaaaaaggggagtggttgctcggaaaggtctatctgaaggacaatcctttgtttgaccaccctgaagaactaatggccgatatccagaccacattattaaagatggtgccactttacgaattaataaatgctaaataaaccaaaaggtgctgctaaattttagcaacgccttttttgatgacaaaaaaagagccagaccgaagtctgactctttttgtttaacagataacagcttatctgttgtagaattcaacgattaaggcttcgtcgatttctggttctaattctgaacgttctggtaaacgaacaagtgaaccttttaagttgtcagcgtcaaattcaacgaatgaaggacgaccaacagtgccttcgatagcgtctttgatgataacaaggttcttagatttttcacggattgaaatttcttgaccaggttttacttcgtatgaaggaatatcaacacgtttgccatcaacggtaacgtgaccatggttaactaattgacgtgcttgtgcacgagtgcttgctaaacctaaacgataaacaatgttgtctaaacgttgttctagtaagatcatcaagttaacaccatgtttaccttcgcgaatcttaccagcgcgagcaaataagtttctgaattggcgttctgttaaaccatacattaaacgtagtttttgcttttcgcttaattgcataccatattctgaaatcttaccgcgacggtcgttaccatgttgaccaggagcgtatgggcgacgggcaagttctttacctgtacctgataatgaaattcctaaacgacgtgaaagtttccactttggacctgtataacgtgacataaaaaaatcctccaataattgttttggagtaaaataatccgatgtaaacttagtaatcgttcagttcacttattaacaatcttcacctttgcagccgcaaggttacacaattgaaccaaaactctgggcaaatgaactgttgacggctttaccgtttactgctgcattattttacacaatggctagtatagcttattcatttggacaacgcaagctattttaatagttgcttggtttaatttttatacaatttatcggcaaatattgctgtatcaacggcttattcatgctataatcaagattagtttgtaataaagaaatcggttaactatttaaaaatctgagttaaatagcaaaagggtgggtctttgaatgctttacattctcataggaatcgtagtcgtcgttttgattggctacttaggagttgctttttatcagcgttacttcaccaaacaaattaagagtttagaagaacgtaagggcgctttaatggcgttgccgattcccgaaaagttgacgaagttgcgctcactacgtttaacgggtgaaagccaacaaaactttgatcgttgggaaaaacaatataatgacattaccaatcataatttcgaagcgattgaagcttatttatttgatgcggaaacagccaacggtaagtatcaattcctattagtagcgcggattttaaaacaactacgtgcctacctacaggaaacggatcaagatttggttgatgtcaaagatgcgctggatcaactattagcaaacgaagctgatacgcgcgaacaaatcgaaacgctgcgggttaagtatcaaggtctgcgcaaacgtctgttgactaagagtttttcatttggcccaggactagaaggactagaagccattttaggccaactagaagaagattttaaccaagctaatgaattaacgggtgccggtgattacttaggtgccaagatgatgttacaaaaattaattgaacaaactgatgatttagaagataaaatggcacgtattccgaagcgttatagcgagttagccaatgagttccctgaacaaattgacgaaattagtgaaacgtatcaagccatgttgcgtgaacattataattttggcgataatcaattggaagtgcagctcacacaagtgacagaacgcgttgataagagtttagatttaatggaagctcttgatattgaatctgttgaagccaataatgttgaaattgcgcaaaatattgatcaactctatgcgagtttagaggttgaattaaatgcacgccaaacagttgaggaacatattggtaagactgagacaattgtgtcacacgcgcaaactcaaaatcgcgaactactattagaacttgatcatttgaaccaaagctatgccttaacgcatgatgagttggtcactgctaaaaaattaacgaagcaaattaatgagcaaaaagcgatgcttgaaggccatcaaggtaagattgccaatcatgaagccgtttattctgttattgcggatgacttaatggccattgatgagcgccttactgagattgaaacacaacaaagagatattcatgaacaagtttctggattacaccaaggtgaagcagttgctaacgagaatttacaacaattcgaattagaattacgaaatttaaaacgaaccgtcgaaaaattacacttaccaggtcttgcggatagttaccttgatttcttctttgtggtaacggatgaaattaaacgcttagatcatgatttaagtcagattaagattaatttagacgagattgccaaacaaatggtacttattcaagatgatctagataagttgaaagtcaaaacaaataatttgattgatagcgcgttgattacagaacagctcttgcaatatgctaaccgctaccgaattgatttccctgaaattcaaacggcttgtgaagaagcgcaagcggtctttaaccgtgagtttgattatcctaagtcagttgatattttagcaacagctttagaacgaatcgatccaggggcttatacgcaggttgaaaagaactattatagtcaaaaacaaactgatgcattataatctttaaaaaagtgggctaaaagatagcgctgatattaatcaggtgttgtcttttggcccactcttgtgtttaatgtaagatagaacactggtctttataaaagaatttgttataattaaaaaagtttaaatactaatttttagtaagaaggatcgataatgatttattttgataatagtgcgactaccaagatagcgcccggcgcgctacaaacttaccaggcagtcagcgaacagttttatggtaatccctcaagtttacacgttgtcggcgaaaaagcatttcatcttctagaacaatcacggcagcaaatcgccgatttattgaacgttcaatccgatgaaatctacttcaccagtggcgggactgaaggtgacaactgggtattaaaggggactgcgattgaaaagagtgcttttggcaagcatctgatcacaacgtcagtcgaacatccagccatcattaaatcaatacagcaacttgaaaaattaggctttgaagtgacctacttaccagttgataagtttggccggattaatccggctgatctaaaagcggcgattcgttccgataccattttggtgtcaatcatggccgttaataatgaaatcgggacgtgccaaccattaatggcagcggcagaaatcttaaaagattatcctaatatccatttccacgttgatgcggttcaggggattggtaaaggtatccaaaaagaaatctttaacgatcgcgtcgattttgtaacgctctctgggcataagttccatggcccacgtggcacgggaattttatacaaaaaacgggatcgtcatcttgcgccgctactaacaggtggcggtcaagaacatgatttgcgttctggtaccgaaaacgttccggcaattgccgctatggctaaggcccttcgtttgttattgactgatgaagcacaaaaggttcaaaaacaagcagctattcgtgaacgcatctaccaacatgtcagccaagctgaaaaaacggtgatgttttcacaattgacacctgattttgcaccgcatatcttatgttttgcaatcaagggtgtccggggtgaaacgacggttcatgcttttgaagagcacgaaatctatatttcaacgacgagtgcttgttcttctaagaagggcatggaatcaagtacgttaaaagcgatgcacgttaacgaaaagattgcgacaagtgccattcggatttcattggacgaatataacactttagctgaagcggatgaattcatcaaagcctttgaccaaattaaccaccgtttcaagaaaattaattcttaaaattaaacattaagggagatattaatgcaatacactgaaattatggttcgctacggcgagctttcaacaaagggtaaaaaccgtaacgattttatcggtcgtttgaacggtaacgtgacaaaagcacttcacgaatacaagcaattaagaattcatccaaaacgcgatcggatgcacattattttaaatggcgacgatgctgaaggggttatcgaacgtttgcgccacgttttcggaattcaaaacttttcaccaagtattgaagttaatcgcgatttagattctgttaaagaaacagctttggcgatgatgaaagaaatcggtaagcccggtatgaccttcaaagttaatacacgtcgttctgatcataacttcttcttggataccaatgatatgaaccgtgaattgggcggttacttatcagacgaattaccagaattagaagttcaaatgaaaaaacctgatatcacattgcgcgttgaaattcgccaagatgcgatttatttaacaaatcaagtgatccaaggtgccggtggtttaccagttggttcagccggtaaagggatgttgatgttatctggtgggattgattcaccagttgctggctacttaacgcttaaacggggcgtggatattgaaatggtgcatttctttagcccaccatacacaagtgataatgctctaaacaaagcgaaagaattaacggctaaattggtgccatacgttggtggaattaagtttatcgaggtcccattcactgaaattcaagaagaagtgaaacattctgtaccagaaggctacttgatgacgattcaacgacggatgatgctacgtttaacggatcaaattcgtgctaaacgtcaagggttagccatctttaatggcgaatcagttggccaagtggcttcacaaacgcttgaaagcatgatggcaatcaatgacgttacaacaacgccaattgtccgcccggtagcaacgatggataagaatgaaatcatcgaaatcgctaaagatatcgatacgtatgatttatcaatcatgccatttgaagattgttgtacgatttttgcaccaccagcaccaaagacgcgtcctaatttggataaaacacgtttttacgaacaacggatcgatgtcgacgctttaatcgaacgttcacttgctggtgttaaggtaacagaaatcaaagcaggtgatcaattcttaaatcaagacgaagagatcattgccgaacttttatagcatcaaacggtccaaccagaaatggttgggcttttttgtttttaaaagaatatgaaatatttcacaaaaacgaaagcgcttatgttatgataaatttatcaggattaataaagtgaggttagcaaaatgagaacgccaaagcatgatttaccagaagcagttgctaaacggattccaatttattatcgttactttaaactactcgaaacagatggtatcgagcggattaaatcggaacaattggcaaaattggttgccattccttcggcgacgattcgccgcgacttttcttatattggtgacttaggccggagcggttacggttatgaagtgagtcacttaattcaaattttttcagctgttttaaaagccgatattctaactaaaatggccgttatcggggttggtaacttgggccgcgccctaattgaaaacaactttagaagaaatgacaacttacagattacatgtgcttttgatacgaaccccgcattagtcggtcaaattttaaatggcgtaccaatctacgccattgatcaactggcgaccgttattcccgctgctgggatcacaacggcgatttcgaccgtgcctagtgaagcctcgcaacggtcagctgaacagctgattgatgttgggattacatcaattttaaattttgcaccgacgcgtctgcaagtgccacggcatatcaatgtgcgttatctagatttaacggcggaacttcaaactttattattatttgaggaatgaaggccctagcctattgacctttggcgtcgactcagctaaactattaacaacgcgttgaacaagagcgattaatattggactagtttagagagaagatgcatggctgagacgtcttccaatgaccaattaatcggtagcttgtgagctgttaacctgaaatttagtagggctaaccggaccatttcgttcgttaacaaatcatgagttggggactagtctagtcctaatttaggtggtaccgcgaaaaagcattcgtcctattgtgaggaatgcttttttgtttgccattaaacgcaatattcaaaaggagtgaagcagatgactgatcacaaagaaatgtcaaccaaatacgatcctaatcaagtcgaagacggtcgttatcaagattggttaaaagaagatttatttaaaccaaatgccaatccagatgcaaaaccatattcaattgttattccaccgcccaatgttacaggtaaactacatttaggccatgcttgggataccactttacaagatatgttaattcgccaaaaacggatgcaaggttacgatgtgttatggctaccaggaatggatcacgccggcatcgcaacccaagccaaagttgaagcaaaattagcagaacaagggatttcacgttatgaccttggccgcgaaaaattcatcgatcaagtttgggaatggaaagatgaatatgccgcaacaattcatgatcaatgggctaaaatgggcttatcacttgattattcacgtgaacgtttcacattagacgatggtttatcagacgctgttcgtaaagtctttgttaacttatacaacaaaggactgatctatcgtggcgaatacatcatcaactgggatccaaaagcgcggactgctttatcagatatcgaagtgcttcatcaagatgatgaaggggccttctatcatgttagttatccattgacagacggttctggcagcattgaaattgccacaacgcgtcccgaaacattacctggtgatacagcaattgccgttcacccagatgatgaacgttacgctgatcttgttggcaagacggtcacattgccattaatgaatcgtgaaattccaattatcgccgatcactatgttgataaggattttggaacaggggcgcttaagattacaccagcgcatgaccctaacgattttgaagttggtaaccgtcatgacttaccacggattaacgtgatgaatgaagatgcaagcatgaacgaaagtgccggtaagtataacggtatggatcgttttgaagcacgtaaagcaattgttgccgacttaaaagaacaaggtttcttaattaaagtcgacccaatgacgcatagtgttggtcattcagaacggactggtgttcaagttgaagcccgcctttcaactcaatggtttgttaagatgaaaccacttgctgaaatggctttgaagaatcaagaaacagatcaaaaggttaactttgtgccagaacgattcgaaaataccttcacacaatggatggaaaacgttcatgattgggttatttcacgtcaattatggtggggtcaccaaatcccagcttggtaccataaacaaactggtgaaatgtacgttggtgaagaagcgccagaagatatcgaaaactggacacaagatactgatgtcttagatacatggttcagtagtgcgttatggccattttcaacaatgggttggcctaacacagaagcacctgatttcaaacgctatttcccaacaaatacgttggtaactggttatgacatcatcttcttctgggtatcacgaatgatcttccaaagtttggaattcacggaacaacgcccattcgaacacgtccttatccacggtttaatccgtgacgaacaaggccgtaagatgagtaaatcacttggtaacgggattgacccaatggaagtcattgaaaaatacggcgctgatgcattacgttggttcttaacaagtggttcaacacctggtcaagatgtgcgtttcagttacacgaagatggatgctgcctggaacttcattaataagatttggaacgcgagtcgtttcgttatcatgaatcttgaagatacaccggcaccaactaaggttccagaagctgctaacctcgatttaacggataaatggatcttaagtcaattaaaccaaaccgttgctgacgtgacccgtttatacgaaggctttgaatttggtgaagctggtcggacattgtataactttatctggaatgatttctgtgattggtatattgaaatggctaaggaagtgctttatggtgatgatcaagaagcgattgccaataaacgctataacttagcttacgtattggaccaaacattgcgtctattacacccagtaatgccatttgtaacggaagaaatctggcaaagtatgccacatactggcgaatcaatcatgaccgctagctatcctgaagtacatgctgaattagatgatcaagaagcaacaactcaaatgaacgctttgatcgatttaattagaagtgttcggaatatccgttcagaggcaaatgccccattaagtaagccaatcgatatcttaatcaacatccaagatacaccgttgatggccatctttaagcaaaatcaagactttatcgaacgtttcgttcatcctaagtcacttgaaattgcagaaggcctaacagcccctgcattagctaagacagccattatcagtggcgctgaagtttacgtgccattggcagaactattggacttagacgaagaaattacgcgcctagaaggcgaattgaaacgtctaaacggcgaaatcaaacgcgcacaaggtaagttagccaataaaggcttcactgaccgcgctcctgaaaaagtcgtccaagaagaacgcgataaacaagctgattatgaacaacaatatcaatcagttgaaaaacggcttgcagaactaaaagcagctcgttaaagcacatctcaaaacgccaccttattttaaggtggcgtttttgtatgccatcagtttttggcaaccgattagcggtcaatctatgctaaaatggaaggagcatgttaaaggggattgagcaatgttggtgacagattacgaaacagctttggcatatattcattcacggccaagattacataaagaagcaaatttaaaccgaatgacccagttattagcggcactgggtaatccacatcagggacaacagtttattcatgtgacaggcaccaatgggaaaggctcagtggtcaatatggtcagtagcttgctggtcgaattgggtttaaaagttggtcgctacacatcgccatttattacccgtttcaatgaacgcattgcgattgatcaacaaccaattgcggatgacgatctggtcgcagttacgcaacatgttcaacagacaattgaaacagtccaacaaacagacgcggactttgaagtgacggaattcgaactgattactgcaattatgttcacctatttcaagcagcaagcagttgatattgcggtcattgaagttggcattggcggcttatacgattctactaacgtcctaacaccattgatttcggtaattacttcggttgggctagatcatcaagccttgctgggcgatacgttggcagcgattgccacccaaaaagccggcattatcaaagcgcaacaccctgtagtgattggcaaattaccagcggaagcacaaaccgtgattgttgaaacagccaaacgattagcaagtccactagcaattagtggggtcgacttttcgacaacagcggttaaaaccttaccaacttgggggcaacagttaaactttcagaatcaaacggtgacacttaagcaacttcaaataccattgatgggcgattatcagattgaaaatgctgcagtagcgttagaaaccttttgtcagtatctagcgttgacgcagcagccacttgatattaagacgcttaagcggggcttggctcacgtgagttggccgggccgctttgaaaaagtaaatgatgaaccgttgattattttggatggggcgcataatccagccggtgttgagcagttggttaaaacagctaagcatcaatttaaacatcaagatatttatattttattcggtgctttgggtgataaatcactggctgggatgttgcctcaacttaatcagttagcaacccacttagtattaacgacggtgccggacaatccgcgagctgctacccaggtgcagtacgcggcagttgataacacgattccatttgaagcgggttggcccgtggcattaaccacaatgatcagtgaattatcggccgatgatgttttattggtgaccggttccttgtacctaattagtaccattcgtagttattttaaaggagtgtcatagatgcaaactagagggattatttttgacatggacggcttattagtcgattcagaaaaagtttattatcaagctaaccaattagcggcgcaaaaaatgggctttgaggtgacggcagaagaccatcaagccattctggggacgacagatacttatttacgccaatatttcttacagaaattaggctcaccggaattagtgaagcagtttattgatttgtcttatagaacagttgatgaaattattcaagaccaaggggtagccattaaaccggggttagtagaattattggactactgtgacaatcacgggattaatcgggtgattgcttctagtaattttagaacaatggtcgaagatttcatgcaaagcacagggttaaagccccgtttcaaccagattgtctcgggcgatgaagtgacacacggtaaacctcatccagaaatctttttaaaggctttagataaacttgccattccagcccctagcgctttagtactcgaagattcaccaaatgggattttagcggctagcaaggctgacattccagtgattatggtgccagatttgattgccccaactgccattactaaccaacaaacattggcaacggttgataatttagcagccgttattccgtttttagaaaaataaaggaccagttaacacgtatagttaaatgaatcgaaaaggcgattaaaaatgccttttgcaggaggctatgacgatgttaacgagtcaatcaaagttacaacccagagagcaagtcgcactgtatggtgcggccagtctaagtgatgaacaattagcaaccgtaattttacgttcaggcacccaacatttacccgttgaagtcgttgcacaacgattattgcaacgctatcccgactttcaagatcttgaacaagcggacttagtacaattacgtcaaatcgaaggtattggaccggttaaagcgattgaactccaagcgatttgtgagttaagtcggcgcattcaaaatcagcggacattacgttttggtgtagtggcttctagtcagatggtaggccaacggatgattgaatccttagcgggagagacacaagaacagctattagcggtctatttagatgttaaaaatcagattattcagattaagcaactctatctgggtacacttaatagttctgttgcacatccgcgggaagtctttaaatgggcggttcagtattcagcggctaagtttatcttggtccataatcacccgagcggtcaattggcaccatcaacgcaagatattaactttacaaaaagaattgttaattgcggacagttgatggggattacttgtttggatcatttaatcattggtagctcacagtacttaagcctacgtgaagaagggtatctagtcgattaaaggtgttttgaatcttgttaagaatctattaattttaaggtagacttgaaaattctcctgaaaatcaggtaccatgaagctacattgcgttttttattattaaaaattatgatataatgccaatgactataaaaacgtttggttattgaaggagagaaaaatagtgttcggattagggactagaaatattggtatcgacttaggtaccgcaaacacacttgtatatatggacgggaaagacattgtcttaagagaaccctctgttgtcgccaaaaatacacaaacaggcgaagtcatcgctgtcggttccgaagcacgcgacatgatcggccggacacctggtaatattgtagcgattcgtcctatgaaagacggcgttattgcagattatgatacaactgcagcaatgcttaaatattttatcgaaaaaacaatcggccattcatcaagtaaaccatttgtaatggtttgtgtgcctagtggtgttacagaagttgaaaaacgcgccgttatcgatgccactaaagttgccggtgcgcgtgatgcttatgtaattgaagaacctttcgcagccgcaattggtgcaggacttcctgtaatggatccaactggtagcatggttgttgatatcggtggtggtacaacagatgttgctaccatttcattaggtgggattgtctcaagtcgttcaattcgaatggctggcgataagtttgacgacgcaattatttcttacatccgtcaaaacagtaacctattaattggtgaacggacagctgaacaaatcaaattagcgattgcttcagcttcaccagaacgtgctaaagaagttgaatcaatgagtgttcgtggccgtgatttagtcactggtctaccaaagactgttgatattaaagcaagtgatattgccgaagcaattaaggaaattgtgacagcaattatcgatgctatcaaagaaacgcttgaagaaacatctcctgaaattgcagccgatgtgattgatcacgggattgttttaactggtggtggtgctttattgaaacatttaccagaagttatctctgatgctactaaagtacctgtcttcattgcccaagatccattggactgtgttgcagtcggtactggtgaatcattgaagaatatcgaagtcatgaaaaaaaattaagattagcgtaaaatagtgggacaaagagcggttagcgtttaagtaggcctaaattagtgattgattcaggtttttttgaatcaatcgcacaaggcccttaataaccggtttttgtcccatatttacgatattaaagatggatggtggcgaataaaccatgcaaaaattcttttcaaataaaaagttaatcattttattggtgacattaatcgtctgcatgggctttatcgcaatgtcagttggcttgcgtaatagtaagaagagtccaagttttatccgtcaattcggaaacgatgtgacaggcattacaaaccaagttgttagtgtgcctgctaatgggattggtaaaggtgtcgatgcactgacagacttaattaatacttatcaagaaaataaagccttaaaagcgcaattagatgatttagcacaaactaaggtccaagcacaaactttaaaagaagaaaacaagaacttgaaaaaagaattaaacttagcagggactttaacagactatacgacgctcaatgcttccgtgttgtcacgaaatccggataattggcagaattcactggtgatcaataagggtgctctagcaggccttaagaagaatatgccagtgatgtctgaatcaggcattatcgggcgtatttcagaagttaataagaccaatgctaaggtggaactcgtttcaagcactggtcgtaacagtaatggttttgccgcagtggttaataccaaagatggtaaacaagttaacggtattatgacgggctataattcagataaaaaacaattgaaattaggtcaaattaaaaccgatacagcgattgctaaaggcgataaagttgttacttctggcttgggtggtttaacacctaagggactttatttaggtaaagtagcttcagttaaaaaggacgactatggtttggcattaaccgtgtatgttacgccagctgctgatctgaataacttaacagttgtaacggttatcaaacgttcgattgaaggtgagtaatatggggacatttcgcttgaaacatcgctatttaatcccaatttacttactagtcgctttttacctggatggtgcgattagttcattaggggaacaatggctatatacgccagatcataccctaattagtcggttattcatgttaatgtttatcatggttgcgtttgttctgcctgaagagacgaatttatcatggtatgcagtggggattggtcttttgtatgatttatattatacggggatgattggcatgtatctttttgtattgccactgattatttatatcgtgcgttacttaaaacaatacattccagattcaccattctttattgggttagtcgacgttatttgtttaacgttgttggaggcctcaatttatattatgaatcggctcgttaatttaacgagtatgacaccagttgatttcattagtaacgttttagcaccgacaattgcattaaacttagtcttttttatctttttgtatttgcctttaaagaaattattgctaaaattaaaatcagaacgatgaggggtttgatttttttatggatgcagtcacgttaagaggacgcaaagaaggattcgaattaaacattgatgctggtgccgattttgatcaagcattagattcaattgtcgcattattgagtaaaattcgctcagaacaacctaagttgggtaatgataagattgaacttgagttaacaactgggatgcgtttattaagtgaacaacaaaaaaaggcgctatatcaaacactagaaccattccctgagtttgatattatgagtattcagtcttcggtaatgacgattgagcaagcccaaattgaacggcaagaaaatagtattcatgttgaaccgaatgttattcggagtggacaagaagttaactatgtcggtgatgttttatttgttggtaatttacaccaaggggctgtcatcaaagcgacggggagtattttcattctagggtctgttgcagggattgtgcatgctggttttccagataatgcagatgcaatcgttgctgggaacctgacgaaagctgtccaacttagaattgcagatgcggttgaaattatcgatccaaagaaaacgccctttaattcacaaagtatcagttatattaacgatttacacgtcatcgattacggtgagataacggatttaaaacaaattaatcctaaactatatcgtaaaatggaggagcaataaaatgggaacagctttggtcatcacatccggtaaaggcggtgttggtaaaacaacctcgagcgctaatattggaacggcgcttgcgcttttggataaaaaagtttgtttgcttgatttagatatcggtttaagaaatttagacgtcgtcttgggattaagcaatcgaatcatctatgatatcgtggatgttgccaaaggccgtgccaaattacatcaagcgttgattaaagataaacgctttgatgaaaaactctatttattaccagccgcacaaaacacggataaagaagcactcgtaccagaagatgttacagcgattgtgacggctttaaaagaagaatttgattttgtcatcattgattgcccagccggaattgaatcaggctttaagaacgcgattgccggcgcagatggtgcgattgtagtcgcaacgcctgagatttcatcagtaagcgatgctgatcgtgttgttggtttgcttgaagaaactgaaatgcaaatcgcaccacgtttggtcatcaatcgcattcgtcgtcatatgatgaatgatggtgaaacaatggacgtcgatgagattacgaaacatctctcagtatcattgttggggattgtttttgatgacgacgccgttatcaagacatccaatgctggtgaaccgattgtcttagatcctaaaaactcggccagccaaggttatcgcaatattgcccggcgcctattaggtgaaacagtgccattaatgacgttgaaagaaaagaaaatcggtttttggggtcgactctttggtaaaaaatagttgacttttcaagtgagaatcactagaataatgtcaatacttaaaacgttgaacggaccaaattagtttttaaggcacagagagctgaggtatggtgtaaatcagcccttcgaaactagtggcacatccgtgagttgattatctgaacgaagtaagataatccgttagcccgttatcgctgtagttttagaaactacataagtttaagcaatgtgagttgtttattaaactgaggtggaaccgcgataatattcgtcctcttggagtaatccgaggggactttttttattggtctaaaactagtagagttgtttgctgtgaagtaaacaaaaaaactgaggtggaaccgcgattgatcgccctcttgacgtgtaaacgtgaagagggctttttttgtggcaatgtttagctaacacgctttgaaggatatgtttatataagggagattttatcatgcaatatagtttatcgattttaccagcgcttttgagtggcgctaaaatgacgttagccatttttagtttaaccgtgattggtgccattcccctggggttattattgagccttgggttattatctaaattcaagccactgcattatttgcttaacctgtatgtttggctaatgcggggaacgccattgctattacaattgatctttgtcttttacggcttaccggtgattgggattgtctttaatcgtttcgacgccgcattaattgcatttatcttgaattacgccgcttacttcgctgaaatcttcagaggcggctttcaagcggttgatgatggtcaaatcgaagcagcatcagttttaggattaacctatccccaaaccattttaaaaattatcgtgccccaaacggttaaaatcgttttaccgtctgtcggtaatgaagtcattaatttgatcaaggattcatcattagtttatgtgattgggattggcgatttattacgggcaggaaacgttgccagcgcgcgtgacgttaatttagtgccattgctgttagtgggtgtgatttatctcgcattaaccgccatttgtacatggttgttaggccgattagaacaatattatcgttattaccgttaggaggacttatcgatgtttaaattagaaaatattaatcagtcattcaagggtcgccaaattttgaatgatttaaatttagaagttgaaacgggcagtattttagcaatcgtgggtcctagtggcgccggtaaatcgaccttgctccgcttaatcagtgggttggatcaaccagacagtggccggttcgtgattgacggtgaaacctatgtcccaagtgccgctgaaaaagggggccggataggtgttgtcttccaagatttccgcttattcccgcatttatcagtgttagaaaacgtcacgttagcgcctaagatggtgaagcaattggctaaggacaaagcgaatgcattaggtcagcaattattacgccaattaggattaagtgcacaagaggcggcctatccgtttcaattatcaggtggtcaacgacaacgggttgcgattgcgcgcgcgttagcgatgcagccggatattttgtgctatgacgaaccaaccagtgccttagatccatcgttagtcgctagtgtggcagaattgattttaagccttaaggaagacggcatgacccaaattgttgtcactcatgatattcaatttgcgaataaaattgccgatcaagtttttgaattacaaccaaacgaggccaaccaatgatgagattaaagagattagcaacagctggtttattattaggcctattagtcagtctagcgggctgccatagccgccaaaagaccgatagttgggcaacgattgaacgccgccaaaaagtagtgattggcatcgatgatagctttgtaccgatgacttatcgtgaaaaaaacgggcaattaaccggctttgacgtcgagttagccaaggcgatttttaaaggtagtggcatccaggttgattttcaatcgatcgattgggatatgaaagaaaccgaattgaacaatcagacgattgatttaatttggagtggttattctaagaccgaagaacgggccaaacgagtggccttcagtcaaccttatcttacgaatcaccagatgattgtctcgatgaaaaaggatcctgttaatcgcttagctgatttgaagggccaaaacttaggtgttcaaacgggttcatccggcatggcccagttggatcgaaaaccagctgttttaaaacaaaaaattgccaatcaaacgccaatcctatatgatacctataacaatgcttttatcgatttacaggctaagcggattaaagggatcttaattgatcaagtttatgctaactttgagattaaagcgcgggcaaatgggcaagattttcaagcgattgaaagtccttttgcggctgagaagtttgcggttggcatgcgcccagaagatcaaaaattacgacgctttattaatcgccggtatcaagtcctcaaacaaaatggacaattagcgaagattcaagccaagtggtttaaagaataggacgcgacagagatgacgacgattattatcataattcttagtctcatattagtaattaatacaatcggtgcgatcattaccgtttttcgacaatcaagagatattgcggcgacttgggcctggctactcgttttaattttattgccagtgatcgggtttggtttttatctcttttttggtaagaaattatcagcagagcacctttatgatttacggacacaggccaaattaggcattgatgaacgcgtgacgcaacaaaaagcggaattacggcaacgacggaagcaaaatcaccattctacaacgccggagattcaaagcttaattaatctcttcctagtgtctaatacagccgttttgacgcaagaaaataaggtatcggtcttaacggacacaaccactgcccaagagcgactactggccgatatgagccgtgctcgcgatcacatccatttagaatactatgcgtttttcgatgatcctttcgggcacatcttaattaaaacgctcgcctataaggcatatcaaggggttaaagtccgcgtcatttatgacggctttggttcgcaaaagattccacgctctttttttaaaccattagaagaagcgggtgggcaagtaacgccctttttcagttcgcggtttcgtttgattaattttcggttgaattttagaaaccaccgccaattagtcgtgatcgatggtaacacggcctatcttgggaactttaaccaacatagtgttgatacgcatttgccagttcgagacacgcgcttacgaattagtggcgacggtgttttatcgtttcaatcacgtttttttatggattggaacgcggcaacacaacgccagaaggtttattacagtcagcattatttcccgacttctgtcgaacatggacaaactagcatgcaacttgtttcgggtggccctgatcgcgatttacctgaaattaagcttggttttttaaagttaattgcggccgctaaaaaacggttatggattcaaaccccattttttattccggacgattccgttttggcagcattaatacttgccattaattctggggtaacggttaaaattatgattcccgaaaaagcgaaacatagtttagtccaacatgctaatctctactatgctaggcagattgttaaagcgggcggacagatttatctatataaagcgagtgcttttagagcacggacgatgatggtcgatggtcagttatcagctgtgggaacggctaatttagatattcgtagttttaaacttaattttgaaacgaccagctttttatatgatcctgcattgaccaatacgttagaattgacctttcaaagggatttaaaagcaagtgtaccgctgactaaacaacagttaaatgcacaaacaacaaatcagcgactctcgcaagatttagcgcgactgttggcgcccattttataaaagtagttacaaaaaggccctcgaaatttttcgagggccttttttgatagtgattatttgaaatagttttgtaaaccagcgtaaacggcatccgccactttttcttgataactactactactgatgtaattaaagtcttgatcagaattgatataacccatttccaatagaacagaagggcgttcgttatcacgaagtacttgataattaccgtattcaacaccacgattagttagtggtaatgatttaatctgattattaagcgcgttggctaagctagtgtccttactatttgagtaataataagtagttgtgccactcgcttggttagattgcgcactggaatcaaaatgaatactgataaaggcatctgcacgtaatttattagaaagtgcaggccgaggtgctaaatcaacgaatttatcagacgaacgggttaagacaacgttggcgccggcggcttttaacttcttagcaatcgcatcgacggtcttaagcgtataagtcttttcgtatttattactatttgatagcgccccaacatcgttaccaccgtgaccggcatctaaaacaatggttgcctcagaaagggaggtagcacttgttttaacgacttcgttcttagcagaaggggtgacgacccaactggcgacataacccgtattaccgtccgcgtctttaactttgtaccaagtgtcgctcttatcgagatacgttagcttcgtgttggcggaatagacttgagaataggcgtagttgacaccaggaccgcttcgcaacttagtattatccagttgcgttgtgacggatttaatatcagaagtggattgactgctactatcatctgttttcgtatccgtttgaacagctgttggtgcttcgttagaaatactaatcaggtcactttggacccaccccacagctgaattatatttaacttggctccaaccgttttgttggtagagaactgttaacttgtcgcctttattgacttttcctaacagggggctgctggcattgctgctttggcggacgtttgcaaaatcattggtgacagttgcgacccggttagaggttgcgctgacttccgtattattgaccaaccaactggcaacccagccaattttatcgccacttaagcggacttgataccagttattcttttgtgaaatgacgttcatcacttcgcctttgcttgcctggcccattgtatcgtaggaaagaccgggtccttggcgcacattaacgacgtttgctttaatggtaatttgttggtacgttgcaaggacgtgtgtcgcgaagagaccgacaccaactagaatgaataatatgagaacggcaggataccgttttatccagttcaaaggtttttgcatatcttcaacacctttgtcatttatttataagagcttcatatggttcattatagcaaagatagtggatatctaaaggggttgacccttaaaaattagaaaaaattcaggaattattgacttttttttcaaataacgttaatctaatagcaacgagaatatgagatgaccagtgataaagtatggtaaacgcaccacttaacagagacgatttcagagctgaaagaaattggcggtgtccacctgactgcttttgaggtctgcgtgtctaacacgccgttggctaacaacgttatgcttaagcaaaaattaaggtggtaccgtgcattcaagcacccttgttcaacgacaggggtgtttttttattgggtatctattggaggaatggaacatgggttatcaaaagccaaaaggcacagccgatattttgccaggagaatcagatcaatggcaacttgttgaaaaaacagcgcgcgacgtttttgcgcgttatcaatttaaggaaatcagaacaccattattcgaaagctacgatgtcttttcacgaagctcaggcgatacatctgatattgtcagcaaagaaatgtatgatttcatggataaaggggatcggcacattgcgttgcgtccagaaggcacagccggtgttgtccgcgcctttgttgaaaacaaattatatggtcctgaacatcaaaaaccttacaaagtgtattacatgggtcctatgttccgttatgaacggccacaatcaggtcggcaacgtcaattccaccaaatcggcgtggaatcatttggttctgaaagcccagcagtggatgttgaagtcatcagcatggcaatgcgtctattacgtgaatttaaaatcactgatttgaagttagcgattaatacactgggagatgctgctagccgggctgcttatcatgaagccttagttaattacttagaaccacactttgatgaactgagtgatgattctaaagttcgtctacacaagaatccattgcgggttcttgatagtaaagatgcgaaggatcaagaaatcgtcaaagatgcaccagtcattcttgattatttaacggatgaagccaaagtgcatttcaatacagtgaagactttattagaatcattaaatattccatacgaagttgatactgaaatggttcgtggtttggattattataaccacaccatctttgaaatcatgacgaataataaagtcttgggccgcggctatacaacggtcttagccggtggtcgttacaatggcttagttgaacaattaggtggtcctgacatgccaggggttggttttggccttggggttgagcgcttattattattgatgaacgctcaaaatagtgacttagtagcggcacctgtgttagatgcctacgtggttggcatcggtgctgaaacaagtgcaacaacgctccacttggttgaaagcttgcgggaagctgggttgacagctgatcgtgattatttagatcggaaaccaaaagcccaatttaagacagccaataagttaaacgcccaatttgtggtgacaattggtgaatcagaattagctgataagacggcccacgtgaaggatatgaccagtggtgttgaaatcacagtgcccttgacgatgctagaagccgattttgcagcagttaaaaatgaactaaaagcacaagaggagaatgcataatgaaaacaagaacaacttacagtggtttagttgatgaaacatttgttggtcaaacagtcacattacatggttgggttcaaaaacgccggagtttaggtaatttaatcttcgttgatttacgtgatcgtgaaggcttagtgcaattagtctttaaccaagacaatgctgatatcttaacgcttgctaacacgttacgtaacgaatacgttattgaagtgactgggacggtgcaagcccgtgatgaagctgctattaacccagatatgaagactggtaaagtagaagtcatcgtgagtgaattaacgattttaaacgaagctaaaaacttaccttttgaaatcaaagatggcatcacaacttctgaagaaacaaaattaaagtatcgctaccttgatttacgtcggccagaaatgcaaaaagcaattattcgccgttcacaaattacacaagcagcacacagatatttagacaataatggtttcttaaacatcgaaacacctgatttaacacgttcaacaccagaaggcgctcgtgattacttagtgccatctcgtgtttatcctggtagtttctatgccttgccacaatcaccacaagtcttcaaacaacttttgatggatgccggctttgatcgttactaccaaatggcgcgttgtttccgtgatgaagatttacgtggcgatcgtcaaccagaatttacacaaatcgatgttgaaacatcatttatgagtgccgaagaaattcaagaccaagcagaaggtattatcaaacaagtaatgcaagatgtcatgcatattgatgtcccaacaccattcaaacgaatgaaatggcaagaagcaatggatcgttacggttcagataaacctgatatccgttttgatcttgaaatccaagacttaactgaaatgatgaaaacaagctcatttaaggtcttcagtgacactgccaatagtggcaatttggttcgtgcaattgtggtcccagaaggtgctgctaagtactcacggaagatgttggacgaacaaacagaatatatcaaacgttacggtgctaaagggatggcctgggtcaaagttgttgatggcgaattaacaggaccagctgccaaattcttaaaagaacaagaagctgaattgcttagtgccctatcagcaaaagatggcgatttagtgctctttgtagctgataaattccaagtagtctgcgatagcttaggctacttacggaaacactttgcacatgacatgggcttagtggatgaatcacaatttgcctacctttgggttgttgattggccattatttgaatatgatgaaggctttggtcgttggattgcagcacatcatccattcacacgtccaaacgatagcgatgttgatttattggaaactgatcctcataaagcacatgcgcaatcatatgacattatcttaaatggttacgaattaggtggcggttcactccgtatctaccaacgtgatatccaagaaagaatgtttaaagcacttggtatcagtccagaaacttatgaagaacaatttggtcacttattaagtgccatggattatggtttcccaccacatggtggctttgccattggccttgatcgttttgcaatgttactcgcaggccgcgataacattcgtgacgtaattgccttccctaaaaactcacatgcttctgaaccaatgacgaatgcacctagtcgtgttgcaccagcacaattagatgaactcggcttagaagttgaaccagaggttgaaaaggattaattaaatactcaataaaaagggctctccaaatggggagtcctttttttgtgagcatattaatcgctaattgcggacatctgactataataataaccacgaaggagtgatggataatgagcgatgatttacgacaacagttaacaccagagcagtatgcggtgacacaggagaatgcaactgagatgccatttagtggtgagtacgatgaatttgatcaaccaggtatctacgttgatgttgtcagtcatgagccgctatttagttccttagataaatatgacgctggatgtggttggccctcatttacgcgaccaattactaagttaaatgaaaaacgagatcaaacacacgggatggaacgtgttgaagtccgtagtcaaaacgccgattcgcatttaggccacgtttttacggatggtccgcaagaacaaggtggtttgcgctattgtattaattcagcagccttaaagtttattcccaaagatgacttaaaagctgcagggtacggtgagtatctcgcgttatttgaaaaggagggtcaataatggcaactgaaacagcaatttttgcaggtgggtgtttctggtgtatggtccatccgttcgatcaacaaccagggattattaaagtggtctctggctacaccggcgggcacgtcgctaatccaacctacgaacaagtttgttcccatacaaccgggcatacagaagcggttgagattacgtttgatcccgcagtgatttcgtatgctgaactagtcgaaatctattggcgccaaacagatccaacagatacgatggggcaattccaagaccgaggcgatagttatcggccagtgatttttgttaattcagatcaacaacggataattgccgaagcatccaaagaaaaattgattgctagcggtcgatttaatgaaccaatcgtgacgcaaatcgaagcagctaaaccattttatcctgctgaagagtaccatcaagatttctataaaaaggaaccctggcgagcagaattaggagaagtcaagcgaaaagccttcattcgagcaaaatggtcggattaattctaaaataacctttagtattaaggggttgtgtgctagaatgaaagacattaaaacgaatgataggtgattattaagtggacgatctagcgcgaaaacatcagaatatggccaaagtttcggcggctatcttatatgggatttgtgtgtcaattgcattgaactttttctgggaagaaggcggcgtgtacgcctcgggcattaccgggttcgcgcaatttattcataccgtgacggcgaagtttatgccgtttctaccattcccattatcaacttccttgatgttattcttgctaaacgtaccgctttttgttttagcttggtttaaaattgggcatcactttacaatttatacgtttatcgctgttattttttcaagtttaatggtccaaattatgccgctgacccaattgacggacaatccaattatctgtgcgatttttggggccgttattaacggttttgggaccgggatggccttgaaaaatgatatttcaaccggtgggttagatatcatcggaattgtccttcggaagaagaccgggcgttctgttgggaccatcaatattattttcaacgttgcgttagtctttgcggctggctttatctttggctgggaacatgctttatatagtatcttgagcatcttcgtcaatggtaaggtcatcgatatggtctatacgcgtcaacaaaagatgcaagtgatgatcattacggacaatcctaaagtcgtgattcaaatgattcaagacgagatgcgtcgcgggattacgattgtgcacgacgttgaaggggcttataaccgcgaagaaaaaacgatgttattcaccgttatctcacgctttgaaatgcatgaccttgagatggtcatgaaagaagccgatgatcacgcttttgtcagcattacagaagcggtcaagattctggggcatttctacgaaccgaaaattaaataactatcaacggagccgtcaatattaaattgacggctcttttattttctgaacaggcgtttatcagctaataaccgcgctctttttcgcttgctttttattctggtatctgtgacaatcgaagtaattatgatagttggaggtcacgcgatgttattaggtagtcacgttagtatgaagggcaaagaaatgctgttaggttcagcgcaacaggcggctgagtttggggcgaacacattcatgatttataccggggcacctcaaaatacccggcgtaaaccaattgaagagttgaatattcaagcagcacaagaattaattgcagccaaaaacttaggcccgattgtagtgcatgcgccttatattgttaacttaggcaatacagtgaaaccagaaaactttaaatttgcaattgaatttttacagcaagaagtcattcgagctgaagcgctaggcgcaagccaaatcgttttacatccgggtgcacatgttggtgcaggcgcagatgctggtattaaacaaattattaaagggttaaatgaagttttacgaccagatcaaacggctcaaattgccttggaaacaatggctggcaaaggaacagaagttggccgtcgttttgaagaaatcgctcagatgattgatggcgtaacgttgaatgataagttgtccgtgacgtttgatacttgtcataccagtgatgcgggttacaatattcgcgaggattttgacggcgttttaaacgaatttgatcatattatcggtttggaccgacttaaggtgatccatttgaacgactctaagaatccacaaggggcgcataaagatcgacacgccaatatcggatttggcgaaattggttttgatgccttacacggtgttgtgacccattcacagcttgttgatgtccctaaaattatggaaacaccatacgttggtgaggataagaaacataattttgcaccatatgcatacgaaattgcgatgctcaaaaagggcgaatttgacccagaattattaacgaagattgagcagaatgaaggtcgattatgagattgaaacgttctcgctatctttggctagcgctaatggttttaccggtattgttattgctggtcaaaccggtgcaagcagccgatacgtatgatattagtcgctatcatgttcaggttaacgtccaaaaagacggtagcgcactagtagaacaaaaaatgaattttgatattcaagatgatatcaacggtatttatctcaatcaaaatttacaaacaaccgttggtgagcctaaaaagttggtgcagccacaagtggccgttaatggccggactttccaagcgagtcaatccgagacggcggggacgtattcgctaacagatgatgatcaaaagtatcgtttcaagctctaccaaccagcgacagaagatgatcggttagcagtcactttgaaatatcagttacaaaatctgattattaattatcaagatactgcggaattaaactggaaagtgataggggatgcctgggacagcagtctgggcgatgttcaagttacgattcaattaccgacaactctgaaacagtctgaattaaagtcgtggacacacggtgatttagatgggcaacagattgttgatccggcaaaagggcgggttaccatcaagatgacaaataacccggccaatcaatttgttgaatcccatcttatttttccaacttcagttaccccaactaaccccaatcgggtggctaaaaagcaacgggcaaccattatcgctcaagaagcgaaacgggctgaagaagccaatcaagcacgtcaggcgcaacaacggcggtattgggtgctttcggtgattgcagtggtcttagcgccagtcttattgttagtggtttggtatcgggttaaacgggcattgccccggatgcattatcagggtcatgcgccagaacacgtctacgacctaccagatgataatggtccagccgttattcgttatctattagcactaccaatgacggaaaaagcaaaggaagaaagtttatcggctactattttagatttggtagcccgtaaaaacctgacaatcgaggttcaaacaccagaaaaacaagttttcagaaaagcgaaaccacaatttacgttaactttgttaaatcggaatcgattatcacgttctgagcaaaaattagtgacctggttattcgatgtcattggtaacggacaacaggttagtctttttgaaattgaaaaatatccgaaacgtcatagtgaaaaagtctttaatcaacattatcgcggttggcaaatggcggttgaagatgaagcaaaccaaagtggttggctacgggaccgtgtttttgccgttgcaaccagtttaaattactggttgataggacttggtacactaaccgtgattttaatgttagcagcgttaatcgaagtcgttgcttggtggacgattttaccaatgttgatagtctttctcctaacggactggcagaggctacgattgcaattatggacgcaacacggttatgaaaaacggggcgagtggttaggctttaaacagatgttgaaagacatttcgacacttgatatggccaatgtacctgacgtgatgttgtgggatcgttatctgagttttgcaacggcattcggagtagccgataaagtggttaaagcgttgaagattaaattgactcctgagcaactacaaacaatgccattaggttattattattactacggctatactggtggactcaatattggtcaatcctttacaagtgcccttagtagtagtgtgaatagtgcggtgagtgctgctaatccaaccagtgtcagtggtggctctggcggattctccgggggttcatcaggtggttttggtggcggttccggcggtggtacattctagcaaacaaatgattatgatattcccgttaaacgtggtatgactatatggaataaatacaaagtataagtgataccggtttaaaataaggaaggcaccaatatggaattcaacgatgttattaataacagaaagtcaatccgctcgtttgatcctcacaaaacagtatcagatgaattaattaaaaaaattattacctcagcacaacgcacaccgtcatggacgaattcacaaccttggcgagtttacgtggcaactggtggaacacttgctagtatcaaagcagatcaccttgaacggacgcaaaataaggttaagggcaattctgatttagcagtgattcatcgtgttgattggggtcaggcgatggctgaaaatagtcgggtgtggaatgctgaaatcagtgattatttgggcgaagaaggtttagcagcatttagcgatttacaaatgcatctttttaacgcaccagccgttatctatttgacggttgaacgcaaagtctcaccgtggatgatttatgacatgggtgcttttagccagtcgattttactggcggcggctaatgaacaggtagacacaattccggcttacgaaacagctaaatatccggatgcaattcgcaaaattgtgggtactccagacaatgaagtaattattggcggcattgcgatgggttatcgcagcgaaggaaagattaatcaattccacgctaaacgaagcccactggatcatttcttgacgattaaacattaaaaaaggcctcggacaaattaaatattgtccgaggccttttttaattgggattaattaacgtgatctgttgagctgcttgcaaagtctaaaccggtttgttcgagaataatagccgctgtttcttcgattgagcggttggcgacattgatgacttggcaaccaattttgtcatataaatcttgtgcgaagtctaattcggctttaatttcatccatatcggaataggttgtgtcgggatttaagccataggcaatcatccgttcacgacgaatattattcaaaacttcgggtgtattcatcaaaccgataatcttcttaggatcaacatgccatatttcgtctggaatgtgcgcctgtggcacgattggcaaattggcaaccttgatgttccggtttgctaaaaacagcgacagtggcgttttagaggtccgagagacccctaataagacgatgtctgcctctaagaagccgtggggatctttaccatcatcgtacattacagcaaattccattgctgaaatccggtcaaagtagcgctcgtttaaatgatggagtgcgccggcttcacctgatggggccaaacctgtttgagccgtaattaatttagaaagtgggctcatcatatcaaatgacgcaatttttttagcgtcacaataattttgagcaatttctgaaaggcctgttgtggctaatgtatgcacaacaattgtttctcccggaacagccttgcttaaaacgtcagttaatttatcaacagaatgcacaaatggaaaacgaataatatcgggtttaatgtttggatattgcgctaaggctgcttgcgcaagttgtaaagcggtttgaccaactgaatctgagaggacaaaaaccgttaagggggtagactgtgacataataaaactcctttttgcacttttatagcgctatcatatcatatttgggcaaaaagcggcgatatttaaaaaaagttttaattaattgcccgtgggttattgaccgtattttcaacattcgctataatagcaaagaacagtttatgtgaaaccaatttttgggcgcgcataaacggttatacttagcacgcgaggggagggatatcatatgggcaagacagtcgttcgcagtaacgaatctctagatgatgctcttcgtcgcttcaagcgttccgtatcaaaagctggtacaatacaagaatatcgtaaacgtgaattttacgagaaaccaagtgtaaaacgtaagttgaaatcagaagcagcaagaaaacgtaagaaattctaatttcttcataaaggaaatgattgaatgagtttacttgaacaattaagttctgatttgaaaacggcgatgaaggccaaggataagttgcgactaacagttattcggagtttaaagaccgctttaactaacgcaaaaattagtgcagggcaagacttatcttctgacgaagaactaagtgtattatcatcacaagttaagcaacgtaaggattctttagctgagtttgaaaagggcgatcgtgcagatctcgctgaacaaacaaaagcagaaattgaaatcgtacaagcttatttaccagaacagctggatgaagccgctgtgattgtaattgttgatgaagcaatgcaggcaacaggagcgacaggcaaggctgactttggtaaggtgatgcaatatgtaatgcctaaggtcaaaggacgagctgatggcgcaatggtcaatcaagtcgttaaatcaaaattgagttaatttttggtaggacttcccgcgggaggtcctactttttttgtggcaaagacgggcttaaacaaggaaatcagttaattttttccctttgtgattataaagtcgctataattgaagaaatagcgcggttgtctgcttttaaaaccagtcttgattgtgatagaatgaatgtagttttcatcttgaaaggatgaatcgtgctattgaaagttgcttttcacactttcaaggtagtttgattttgaaatgtgtttaggtgaataagctcatctaaacattctgagaggggtttactttttggttgaggtagaagagcgtttatttcaattagcaacgcctaatttggcggctgctttaatgggtgcacacgatcactttttaaaaatcattgaagaaagtctaaccgttgaattgattgcgtttgatgatcatattacgattcgggggactcagccggggttaagacaagcaaacgcggttttagagagtctagtcgcgttattacaacacggtgtgatcctcaaggagacagacgtggtcagtgcgacgaaaatggcgctcaaagggacgttaaatcaatttgaggccctttatactgaaccactcatcaatgaccgcaaaggccaaccaattcgtgttaagacgtttggacaacggcaatatatcgatgcaattcgccacaatgatgtgacgtttgggattgggcctgccggaaccggtaaaacgttcttagcagtcgtcatggcgattgctactttgaaaaaaggaacggttgaacgcattattctaacgcggccagctgttgaagctggtgaaagtctcggctttttaccaggtgatctaaaagaaaaggtcgatccttatttacggcccatttacgacgcgctttatgcggtgttgggtaaggaacatacggaacgactaatggaccgtggggtcattgaaattgcgccacttgcgtatatgcggggccggacgctggaagaagctttcgttattttagatgaggcccaaaatacgacacctgctcagatgaagatgtttttaacgcgattaggttttaattctaaaatgattgttaatggcgatatcagccaaattgatttacctaataaaacccagagtgggttagtacaagcggaacaaattttgcgcgacattcctaaaattagctttgtgcaatttagtgcggaagatgttgttcggcacccagttgtcgcgagaattattaatgcctatgcggcaatggataagacgagaaagtaggacgaatgaatggatattcaaatcatcgatgaaacaaaaattgtatcagaagcacaaattaaattggtggaagatgtattagagtttgctggtcaaaagcttgaattagctgaagatacagaaatgtcagtaacatttgtgaccaacgaacgcattcgccaaattaatcaagaataccgtgatacggatcgtgcgactgatgttatcagttttgcaattgaagaggatcctgaagaagaaggcttacctgccaactttgaagaattgtttgatattcctaagaatattggcgacctatttgtttcattagaaaaagccgctgaacaagcagaaacttacggacattcatttgaacgtgaattagggtatacgatggttcatggtttccttcatttgaatggctatgaccacatccacaccaaagatgaagttaaaatgattcctttacaggagactatcttagatgaattcggactcaaacgctaaaaagacgcagacggataaaaatcgtaattttaatcaatcgacacatcacgctttagatgggattatcaccgcttttaaggaagaagctaacctgagacgtgattttgtgattgcgatggtcgtgctagtagccggttattttgcccgattacactatctagattggctatttttgattttagcgatttttatggtgttgctggctgaattttggaataccgtgatggaacactttgtcgacttattggttgatcggcagtttcatccactagcgaagaagattaaggatatcagcgctggtagtgttttaattggcgcgtgtttagctgtgattattggttgtgtcgtttttggacacgcggtgctttattatttttaaaagagattaattaagatttaaaaaaggggactattatgtcagatacttatcgctcaggctttgtggccattgttggccgaccaaacgttgggaaatcaacatttatgaatcgaatgatcggtgaaaaaatcgccatcatgtcatcaaaggcacaaacaactcggaacaagattcaagggatttatacagatgacaacgcacaaatcgtgttcgttgatacacctgggattcataaaccacataacgaattagacgaatacatggatcaagcagcactttcaacatttaatgaagtcgatgcgattttattcatgattagtggcgttgataagaagggccctggggatcaatacatcatggaccaacttaagaatgttaaaaagcctgtttatttggttgttaacaaaattgatgccattcacccagacgatttattaccaatgatcgaacaatatcgtcatgaattagacttcaaggctgtttatccaatttcagcattagaaggcaataacgtgcccgaaatgttaaaagaacttgaattaacattgccagaaggcccacaatactatcctgaagatcaattaacagatcacccagaatatttcgttgttggtgaattaatccgcgaaaaaattctagaattaacccacgaagaagtcccacattcagtagccgttgtggtcgaacgaatgaaagaccgcgtcaatggtaaacttcaaattgaagccaacatcattgttgaacgtgatggtcaaaaacggattattatcggtcaaaaaggctcaattatcaaagaaatcgggattcgttcacgtcgcgaaatcgaagctcttttaggcgaaaaggttaacttgaagctttgggtcaagattcaaaagaactggcgtgataataaccaatatctccgtgaatttggttacaataaaaagagattgtaggctttaaagatggcggaacatcgatttgaagactttaacggtctagtgatgtatcgaaagaattataaagaaaaagatatgttggttaagattttaaccgatcgttttggtaaaaagatgttttacttgcgtggggccaataagcctaaatttcgtctaagtgcggctattttgccgtttacgcaggccgaatatggcggcgatattcgcgatgatggcttatcatttttgaataatgtgaagtcagccacgcaatttcaaacgatcagtcaggatttatttttaaatgcttatgcgacttatatcctgaacttaattgatgtcggctttccggacagtgaaccattaggcatctggtatgataaggttgaacaggcgttaaatctgattgatgaaggttttgatgcggcgatgattacccatattattgaaattcaattactacaggtgtttggcgtccaaccgcaattacaaggatgtgccgtttgtggccgaaccgatttagcgtttgattactctgagagttatggggggcttttgtgccaacgtcattggcatttagatcccaatcgtttccacagtagtcagcgggcaatctattatctccgattgttttccgtgattgatctgtttaagattcaatcggtgaacgtgaaggaagccactcaggtcgaactcaaaatgattattgaccgactctatcaagatactgtgggcctgtcattgaagagtaagcaattcatcgacaagatgtacagtttcgatagtcaattaccacaattaaaaaaagtgccgtcagaaattgacagcacaccaaaagacgactaaaatagtaatcaacttaatagacgttgaagaaaagggtcccttgaaacggtcagacagtgattctaggtgagtgagaactagaacaagttttaagtggattggcatttcggagtcataccaatgaagcagcagctcgctttgagctgaagtagggtggaaccgcgagaaatcgtccctatgtgactaactgtcgcataggctttttttatgcgcaaataacggaaaagaggaattgaaatggttaaaaagttgaatgttcaagaaatgattttaaccttacagcgtttttggtctgaaaaaggctgtatgttgatgcaatcttatgatacagaaaaaggggccggcacaatgagcccttatacgttcttacgggcgattggaccagaaccttggaacaccgcttacgtggaaccttcacggcgtccagcagatggccgttatggtgaaaaccctaaccgtttattccaacatcaccaattccaagtgattatgaaaccagcacctttaaatattcaagaattttatttggatagtttacgggccttaggaatcgatcctttagaacatgatatccgttttgttgaagataactgggaaaacccatcaatgggctgtgccggtgttggttgggaagtttggttagacggaatggaagtcacacaattcacatacttccaacaagttggtggtttgcaatgtgaccctgtcacgagcgaaatcacatacggtgttgaacgtctcgcttcttacattcaagatgttgataatgtttttgatcttgaatggggtaacggcgttttatatggcgatattttcaaagaaccagaatatgaacactcaaaatacgcctttgaagatagtaatcaagaaatgcttttgaaattctttgatgaatacgaaacagaggccaaacgtttaatcgatttaggtcttgttcacccagcttacgattacgtcttgaaatgtagccatacctttaacttattggatgcacacggtgctgtttccgttacagaacgggccggctacttgtcacgcattcgtcggatggcacattcaatcgcgcaagcattcgtcgctgaacgtgaaaaacgcggattcccactattaaaacatgcacaagaagcaaaaacggaggtcgtagatcatgactaaaccattcttattagaaattggcttggaagaaatgccagcccacgttgtgatgccaagtatccaacaattagaaaaacgggtgcgtgacttcttagaagaacaacatcttgaatttggtcaattaaaaacttatgctacaccacggcgccttgcaatcttgattgaagacttagctgacaaacaagctgacattcacgaagaagcaaagggccctgctaaaaagattgccctcgatgctgaaggtaactggagtaaagcagcccaaggtttcgttcggggtcaaggcttaacaacaaatgacattacttttaaagaattaaaaggcgttgaatacgtctatgttgaaaaatcaattatcggcaaacccgttgaagccattttaccggagttaaaagccgtcattatggcgatgaccttcccaacacggatgcactgggctgattacgatttcgaatatattcgcccaattcactggattattgcgctattagatgatgaagttatcgactttagtattctaaacgtcacaactggccgcacaacgcaagggcaccgtttcttaggccaagaagtgactttggctaaagcaactgactatgaagcagcccttgaagcccaattcgtgattgctgatgaagctaaacgccaaaacttaattcaaacgcaaattgaaaaaatggcgcaagaaaacgactggcaagttgatttagatgctaacttattagaagaagtgacgaacttagttgaatggccaaccgctttttacggtcaatttgatgctaaataccttgaaattccagaagaagtgctcatcacttcaatgaaggacaaccaacgttacttctatgcacggagccaagctggtgatttattaccagtctttatcggcgttcgtaatgggaacgacgctttcatggaaaacgtgatcgcagggaacgaaaaagtccttacagcgcgtttagaagatgctgatttcttctaccatgaagatcaaaaagtaaccatcgctgaaaacgtcgctaagttacaaaacgtttctttccacgataaaattgggagtcttgctgaaaagatgacccgtgttggtttaatcgctcaattcttaggtcaaaaattcggtttatctgaagctgaattagttgatttacaacgtgctagcgacatctataaattcgatttagtaaccggcatggtcggcgaatttgctgaattacaaggtgtgatgggtgaaaaatacgcgctattacaaggcgaaacacctgctgttgcgactgctgttcgtgaacattacatgccaatcagtgcagaaggcgccttacctgcaacgaaagtcggtgctgttttagcaattgctgataagttcgatagtatggctgatttcttcgctgttgggatgattccaagtggttcaaacgatccatacgcattgcgtcgtcaagcttacgggattgtccggatcttagaaaaccaagactggcacttcccaatggctgatttccaagcggctatgagccacattgttaagcaacaagccgatttcgatctagattggtcagccaatgcagctgccatcagcgatttcttaacggatcgtgttcgtcaacgctttaacgggatgcgtcctaaggttcgtcgagacatcgtcgacgctgtcttgaaaaaccaagggcaagacccagttgtgatgtttgaagccgctaaagtgctctcagcacatcaagatgatgctgatttcaaggcaacaattgaagctatcacgcgtgtcttacgtttagctgaaaaagttgactttgaaacaactgatttaacggttgatccagcgttatttgaaaacgatgctgaaaaagcactttatacagcagtcgaagacttacatggcgcaacagcgacaaatacgttagctgaaaattatgccgcgttacaaacactacgtccattaattgaagcttacttcgatgccacaatggtaatggctgaagatgaagccgttcgtcgtaatcgtttgacacaactcatgattatcgctcaaatcgcgcttagcttaggcgatttaaacgaattgattgttaaataagcaattcaaaaggggataataaacatgttacaaatgaaacgggtttatgaagcagccgccgattctgacggttatcggatcttggttgatcgaatttggccacgggggatttcaaaagaacgcgccgaaattgagacgtgggctaaagaaattacacccaccactgacttacggaagtggtttggtcatgaaccagctaagtttcccgtttttaaagaaaagtatcttgctgaaattgctaccaacccggattggccagaattctgtcacttagtgcagcatcaattagcgcttggtgatgtgacgctcgtctacgcggctaaagatccgcaatataaccatgttgtgattttaatggcacttttaaaaaaagacgcttgacaagtaataaaaatgtttgttatatttatttgcaactacacctaaatggtgctatgatatatagtgtatttttgtgctgataatcctaagagtcgcatttcattgtgaggtgcggcttttacagtcttagtacaaattgaagtgaattgtgaggtgagaccaatggcgggtaagattccgaacgaagtcatcgatgagattcggagccagactaatattgttgatgttgttggtcaatacgttcaactcaagaaagccggcaagaacttatttggtgtttgtccttttcatgatgagaagacaccatcattttctgtgagtgaagagaaacagattttccattgtttttcttgcggtcgcggggggaacgtcttcaagttcttgatggaattggaacaaattagttttccagaagcactgacgaaggtcgcagattttgctggagtgacattggcggatagttataagccaactgctgttcatcgcgaatcaagcgaagttacgcagtttaagcaactctatcaacaagccaacgaactgtttaagcatattttaactagtacggtggctgggcaaccagcgcttgattatttacacgaacgacagatgaccgatgcgttaattgagacctttagtattggttatttaccggatcaatcagatctattgttgacgtttttccagaataaggatattccttatcaggtattgcgccaatccggattgtttattgaaacacaaacgggtaagttacacgatcgtttttctgggcgggtaatgttcccaattcgaaatgctcagggtgaggtcatcgccttttccgggcgggtcttaaccaaacagccggatcaaccaaaatatttaaatagtcctgaaactgtgatttttaataagcggaaagtactgtttaactatgatttggctaaacaaattattcatcaatccaaaaaagtttatctttttgaaggctttatggatgtgattgcggcctattcggcggatgtcgtcaacggtgtcgcgtcaatggggacgagtttgaccaccgagcagttgaatctgctagcgcaacaagcgcaggaattagtggtgtgttatgatggggatcaacccgggattgaagcgatgaaacgggcgattaacctattgcaacagcatacgacacttgaattgagcgtcgtggtcttaccaggcggcgtcgatccggatgagtacgtccgtcaatatggtagtccgcaatttaaggaaaccttgcaaaatgggacggaaacgcccattgcgtttgaactacgttacttgaaacaaggtttaaacctcgataacgagaaggatcagcttgattacgtacaacaagcattagaagttgtggcgcgtgttgagtcgcctttagcaatcgaagtttacttgaaacaggtcgaagccgatagcgggattacactggatacattgaagcggcagttacaaacggtgcgggttaaacatgccacgcaagtccccatcaatcaagtgggacaaccggaagcaccgccatactttgatgattttcaggcaccaccgctaccaccagaagaaatggccggggcttttggcgatccacggacgattgcacccaagcggcagcctaaacggttaacgcggattgagcatgctgagcaagaaattttgcacatgctgattcataacgaagatgtgcgtttacaactcgaaaataatgcagactttagctttgtgcataccccataccaactcttatatgagttatggcggtccttcatcgcagaagggcaatcggctgatatagcgggtttcacgagttatattccagatgacttgcaagaactagtcgttcagattgatctgcttgatttacctgaagaggctaatcaagaagcgttgaacgattgtttggcggttatcgggcaaaattcgattcaggaacgtttaaaagaagcaaaaatcgccttaaaagaggcaactaaattgggcaatcatagtgaggagctacggttaactaatgaagtgatacaacttgtttcgcaaatgaaatgagatattaactaggaggtttctgaatggctgacaataaaaaagctgatacgaagaaattagacactgcggttaaggccttaattaaggaatacaaacccaaaaaagaaatcaccaatgatgaattagtggcaaaaatcgttaaaccatttgcacttgaagcagatgaaatcaacgaattaatgcaacaagtggaagatcacgggattgggatcgttgatgaagacgggaatccaagtgctgccacattaaaaaaagaaaaagtttctgctaaagaattaaaagatatgtctgcaccaactgggatcaaaatcaatgatcctgttcggatgtatcttaaggaaatcggccgtgtttctcttttaaatgcgcaacaagaagttgacttggccttgagaatcgaacaaggtgatcaagaagctaaacaacgtcttgccgaagctaacttacgtttggtggtctcaatcgctaaacggtacgtcggccgtggcatgcaattcttggatttaatccaagaagggaacatgggcttaatgaaggctgttgaaaaatttgatcatcgtaaagggttcaagttctcaacttacgccacatggtggattcgtcaagcgattacgcgtgcgattgccgatcaagctcggacaattcggattccagttcacatggttgaaacgattaacaagttaatccggattcaacgtcaattactccaagatttagggcgcgaaccaacgcctgaagaaattggggctgaaatggatatgaacacggataaagttcgtgaaatcttgaagattgctcaagaaccagtttcccttgaaaccccaatcggtgaagaggacgactcacacttaggcgattttatcgaagatcaagatgcaactagtcctgaagaacatgcttcttatgaattgttgaaagaacaattagaaagtgtcctagacaccttaacagatcgtgaagaaaacgtcttacgtttacgtttcggtcttgacgatggtcggacacggacattagaagaagtgggtaaggtcttcggtgttacgcgtgaacggattcgtcaaatcgaagccaaagcattgcggaaactacgccacccatcacgttcaaaacaattaaaagatttcttagaataaattcaaaaaaacggtcatctaaaaagatgaccgtttttaatttggacaatacttcaaataataaatcttatgtcaactagatgtatctttcaacattaaagacactgatagagcgtttgctaaagattgaaaatgccccataacccaaagccaatcatcatgagtgccattaagcctcctgagtacagggcaatcggcatgaagtacgaaacgttgcgattggcctctgtttttaaatacttgaaagtatttagagttgcgtaaacctgatagagaccgagcattaaaaggacaacacttaagaagagagacataggacaacctccaaattattatttaaagcgctttctttcatttaactagagtatagaacggctgggatgattatgcaacctttaacgacaatcaatattcataatgagacgattgtctgatgcgagcttagtctgctttgacgctcaaaatttggtatactaactgtaacaatcaaagtttctagaatggagttttatttttgtcaccaattaatttatcgaaacgtttagctgcagttgcgcagttcgtcccacaagatagcatcgttgctgatatcggctcagatcatgcttatttaccaatctggctcacagagcaaaaacgattaaagggggccattgcgggtgaagtggttgctggaccttttgaatcaacccaaacacatgtgatccaatggcacttagaggaccaaattcaagtccggttaggtgatggtgtcgaagtgcttaaccccgaagaagaccaagtcacctgtattgtgattgcggggatgggtggtctattgattactgaaatattggaacgtggcttagcgcatctaaacgggcacgaacggttagtcctacaacctaatattatggaacccaccgtccgggaatggttaatgaagcaccactacgccattgtagaagaagcaatcgttgctgaagacggtcatatttacgaagtcatcgttggtgaaccaagaactgaggctgttgaactcgacgaagctgacttagtattcggcccagttttacgacgccgtcaaccggcagatttccaattgaaatggtcaactttattaaataagaaacgccatttattggtgcaacttcaaggtgctcaggtcacgccaactgaaaaaattgctacagtgcaacatgaaattcaattaattgaggaggttcaaacatgggacaattaatcgcgagtgacttgattgcggcgattgaagagtatgcgccattagtgcttaaagagggtaatgatccaactggttttcaaattggtcgccgtgataaggtggttaagaaggtactcgtcacattagatgttcggccggaagtggtccaagaagcgattgataacgagattgattttatttttgcccaccacccagtgatgttccgacctgcacgcaatcttgatctaagtgatccgcaaaataagatgtacgctgatatactgacgcatgatatgacggtctatgcagcccataccaaccttgataaagcgcaaggtgggatgaatgattggttggcagcagcgttagcacttaaaaatgtgcaaccgttcaacgtgactgattatgaagcgctaatgaaattggccgttttcgtacctgaaacacatgcggatgtggtacgccaagcgttagggcaagctggtgccggtgaattaggaaactatcaaaactgcagttttagcgctgaaggcaccggtcgttttgaaccgcaatctgcagctgatccgtttattggccaagctggtcaggcagaagtggttgctgaagttaagatcgaggttattttaccagcagctaaaaagaaccgcgtgttaaaagcgatgcttgcggtgcatccttacgaagaaccagcgtatgatttaatcccattggctaatcaacaacaacctatcggaatcgggcgtattggtcaagttgaccaaccaatgacagtccgagactacgcccaatttgtttgcgaaacgtttgatttaaccggtctccgcttgatttcaaatgaacctgataaattagttgaaacagttgcagtagttggcggtgatggtggtaagttcttccccgctgctctgcaagctaagtctgatttgtatattactggtgacgtttattatcatacgggccatgacatgttagcagccggattatccgttatcgatcctggtcatcatattgaaagcattgtaaagactaagatgactgcgttatttgaagaatggcgtcaaataaacgattgggaagttacttttattaaatctcagcaaaaaactgatccgtttacatttatttttaatgcgaagtaggttagaatagaattagtattaaataatatctaggaggcttcaccatggctaaatatgaaaaattaattccgcgttttctagaatatatcacaacagaaactcgttcagacgaaaatgcgacgacgattccatcaacacaaacacaagtggttttcttacacaaattgatggatgacttgaaagaaatcggcttaagcgacgttaagtataacgaaaaaaacggctatgttacagcgttattaccaagtaatatcgataaaaaagtgccaacaatgggctttttatctcacgttgatacagcagatttcaatgccaagggtgttaatccccaaacaattgaaaattatgatggtgaatcaattatcaaattagacgaagctggtcaatttgttttagatcctaaagaattccctaacatgaaaaactacaagggccaaacattaattacaacagacggctcaacattattaggttcagatgataaatctggggttgctgaaattatcacagcgatggattacttcatccaacatcctgaaatcaaacatggcgacatcaagattggtttaggaccagatgaagaaatcggtacaggtgctgatcacttcgatgctgaagattttgcaacagacttcgcttatacaatggatggcggcccaattggtcaacttgaatatgaaacatttaatgcagctgcaatgaaagttgatattcaaggtaaaaacgtgcatcctagtgaagctaaagacatcatgatcaacgctttacaagttgctgttgatttccaagatgctttcccacgcgatgaagtgcctgaaaaaacagatggccgtcaaggtttctatcacttattgagcttagacggtactgttgatgaagcacacatggcatatatcatccgtgattttgatcgcgatggtttagaaacacgtaaggcatttgctgctaaagtggctgaagacatgaatgctaaatacggtgaaggtcgcgttaaagcaaccattaaagatcaatattacaacatggcagaagtcttaaaagatcatatggatgttgttgatttggctaaggacgctatggaagcaatcgatatcaaaccattaatcgaacccgttcgtggtgggacagatggttctaagatttcattcatgggaattccaacaccaaatatctttgccggtgctgaaaatatgcatggtcgctacgaattcgtttcagttcaaacgatggaaaaagcggttgatacaatgattaagatgaacgaattaaacgttgaaagaaactaaagatataaaaaagagtccaacaattcaatttgttgggctctttttatgcttaatttaagcttgattagttgtcagtaaaccttttagttgctcaattggtagttggccgggcgcgctaggtgtttcgagatagccaaaactgatagctgagccaaattgaccgccaaagattcgcgaggcgacaccaaattcagacattgccattgtcgttaacggtttatcggattgatgcgtaaaactttgagtggctgctaacaagcgggttgtatctgctggtgattgggccgtcgtcgctaatttcaagaggtccgcatcaggatcggcttgcatggctaataattgcgtgcgcaaggtatcattatccggtgtttgaacggtatcatgatgactcaaaagcacttggtaatgctgttgatgggctaattcagccaattgatgacgttgctcggctgctaatgaccactctaaatcgattgcttgaccaatatgggctttgatcaagggagcgtagtaggtgaggtagtcttgagctgatgctaagccaccatcgttagtggttctaaccgttaaaattaagggcaaatcaagcgcggctattttttcagcagcggtcaatagttgtgcagaagcttgccaataatcaaggcgccattcgagaatatcgatggcgtcttttttttgattgatgaggattagttcgcgcagacagtcgtccaaatggcgtggcattagggaaacggccgtttgggtttgaccggtagtaaactcgaggtgcatttcaaaaactcactttcttaaagagattgatcgatatggttgacgagatattgtccgtcaacctgtttgaattcccagatttcgctgaaacgttcgatataagttgcttcacggcgtttttcattatcttcatctgataagcgatcattagtgaaataatcgcgcatttgggccgttacaaggactttacggacgtttggattgtccgataggatcagttcctctaggatcagttcctctgagatgatggtgagactttccagctgattgtgtttatgttggcgttgataacgatttaaaatacgttgttgttgccgttggaaatgaggggttatgagcggtgcgaccaaactaagatcattggtggtccaagcggcttcaatttggtaaaagcattcttcaaaacgttcgcgggttgcatcgtcaatcgtgacggttcgtgatagtgcccgttcgtgacgccgcgccagccagtcgcgtttcttgcggatgatcattaggaaggctgatatgataaaaaagattgcaaaaacgaggttgttgagaaaactacggggcccgtagtaaccccggcgaccgtaataattgttcgttgttctgtcggtggtcgtacttgtgctgccaccaaacgaaccactagaggttgaaccaccgccaccacctgaagctccaccggctcttgcataggtagcagttggcgctagacagatgagacttaataataaaatgaaactgatgattaattttttcatattcgacctcgctattaaataacattagtcactattttagaggaattaatgggcttaggcaatttaaagattagtaaagtttaatcttaacattaaaaaaagagccgggattttatcccaactcctttttgtgattgtttaaacttttaacgatgagcaatatcgatttctgcgagccaagttagcgcaagcgggagccactgggcaaccggttcattaacgtcttgtggtttaccgggacgctgggttactttattggccaatgccaaaccgtgaacaccatcgctgaataagtgatactcagttgtgatgtttagccgatttaattcagtgacgtacagtaatgaattgatggctggtacgagttcatcagttgccgtttgccatacgaaacacggtttggcccattttgttaatgtgtcctgtgcgtgccagagacgttgatcggttgtaatccgctctttttcactttcttctttaggaaaaccagcgtctaaatcaatgacaggatagcttaaaataactgcggcatggtggccacgataactgtcgagttgatattgtgtgttcagttcagggttagtagcgataccgttaaaagtagccactagatgcccaccagctgagaaaccaacgagtacgattcgttcgggatcaactttttgagtatctgattgatctgtaatccactcgatcgttttagcgagctgttggagcgctgtaggataaaccatttggtctggttcgatgagttgataaggtaagacaactgcgtgacagccttcagctaatgcctttaaggcaattggttctgtttcacgctgtgaatggtagcggaaaccacctcctgggcagataatcacgaccggttgatggcgagtgttgttaaaatcttgattggaatctagccagtaggctgtaacttgaaagtcctggtgattcgttgtgagcgtttgattcataatttgcatagatagacagcctttccgtctgaataagcgaagcgctttcagttgatgcttttattttactttaaataaataacacctgtcaatacaatcggggaaatatatttcaggctatgaacaatacgagtgcttttaaaaacgactttaaaaagccgattatttaaagtatgatagttgctagaggaaaaatgcaatgatatcaggttatacagcactttatggcttgattgcgcatccagcgcaacatagcttatcaccctttattcacaatactggttttcaccaaattcaaatggatgcgcgctatgccgtcttcgatagtcaggcaacaccggcagcaatcgccagcgcaattaagacgctaggtattcggggcgttaatctatcgatgccttataagcaatcgctggttccgctagtagataacttaacgtcaacggctaaattagtgggggccatcaatactattaaaaacgaagctggtcgtttaacagcaaccaatacggatggtgatggtttttggtgtgccttgcaaaaggcacatccccagcgccgatatcgttctgtcacgattctaggggctggtggggcggcactagcggtaattgaggcagccgtgcggtatggtgtacagcaggtgaccgtttttaaacgtgctaatgcgacttatgattcagtcattcaacgattggctcaaattagcctagccagtggcctacagatcatcgttgaaccgtacgatgaccagttagcattggcaactgccttgcaaaatgctgattgtttaattaatgcaactaatattggcatgaccgcaacaccgggtaatcccttaccaattaacttactgcaatatttgcccgaagatagcctcgtcgcagatctaatttacgcaccgcgagagacagcttttttaaaaacggcccaaaaagcgcattaccaaatacaaaatggcctgggcatgctgattgaacaagcggccttgagttttgaattctggaccaacgaatcaatggcgacaatgccaatttaccaacatctaactggaggcaacgatgcatcatgattattcaatttaaagcagcaacgagcaaatcactcatccaagatttttgtgaacgacaacgccaagctggtgtcgtggtttaccaatcagcacaacacgtcgcattaattggacttaaggaagtgacattaactgctgcagaacaaacaggcgtcgattcaatgacaactgatgaaccaagttatgttttaagtagtcgattattccaacctgaaaatacaatcattcaattaccacacagtacaattggtggcgagcagtttacgatgatggccgggccatgttcggtagaatcagctgagcatattttagcgatggctaaagtggccaaggaaggtggcgcaactttactgcggggtggcgcctataagccacggacttcaccttactcattccaaggaatgggtgaagcagggctcaaagcactccgccaagcagccgatgcaacgggcatggatgtcattacggaagtcatggatgaaacgcatgtggccctaattgcacaatacacagatgtctttcaaattggggctcggaatatgcaaaacttttcattgttaaaggccgttgggcagacgaacattccagttgctttaaaacgcggtctagccgctacagttgatgatctattaaacgctgctgaatatatcgcagccaatggtaatcaccaaatcatgctcttagaacgcggaattcggacttttgataatcaatatacccgcaatacgtttgatttaaacgcggttcctgtccttcaaaaattatcacactacccagtggtcgttgatccaagtcatgcgacgggggaatgggacttggtgacaccgatggctagagccggcgtagcaactggtgccagcgggatgatggtggagattcatgaccatcctgaagccgccttttccgatgggccacaagcgttgaaacccgcgacttatttagaaatgtgtcgtcagatctgggcgattgatcaattgatgcggtcgtggtaaaaatgccaactatttcggttaatttaacgacgcagaaatatcaaattaaaattgaaaatggcttagcgacttcaatcggacgtgaggttcaacgggtgtggtctgtacgtaaaattgcattggtcacagatacgattgtcggccctttgtatcaagcacaaattactgagcaattgacgcaggcgggttttcaagtgaccgtcctaaccatctcagccggcgaatccgctaaatctctcgaacaagcgatgagtctctatgaggcattgttaacggccaactttaatcgcagtgatggcctgattgctctcggtggcggcgttgttggggatttaacggggtttgttgcctcaacctatatgcggggcttaccgtttattcaaattcccacttccttattagcgcaggtggatagtagtgttggcggcaaaaccgctgttgatttaccagcggggaaaaatttagtcgggactttttatcaacctgagctagtcttaattgatccgcaaatgcttgagacactaccgcaacggcaattagtcactgggtatgctgaagtggtcaagatagcggccttagtcggtgccgatttttggaacctcgttcaacaaatcgaatcgccgactgcaattttggataaagccccagagctgatcgcgcgcagcattgcctataaggcgcagattgtgatggcggatgttcaagaaagtgggcaacggcgattgttgaatttcggtcatacaattggtcatgctgttgagtctttggcagatggtgagctaacgcatggcgaagcagttagtatcgggttaattgcgattagtcgccttttcgaacaaccgactcaaattgcggcacaactgcaaactgttcttgaacgggttggcttaccggtcacgcacccgttattacaatcacccgcattatttgagaaaattacgcatgacaagaagaatcaaggcgctctgattaacattgtttatttaaaagcgatcgggcagccaactattttacaactaccattaacacaatttagtgcccaattaaaaatgaaacagcgctcgttttagaaaatactggtaacctgcaagcagatactttacaattagactagattgaaactgatttacaggggttgattcactagatgcagttaattttaattgggtttatgggttctggtaaaacaaccattgcgcgtaaagtcgcacatcatttcaagagcgaatggattgatttggacaaatacatcatgcgggaacagcagatgacgattaacgaaatttttgccattaaaggccaatctgcgtttcggcagatggaatttgaagcacttgcaaaattggttcaagaagatgtcgtcattgcgaccggtggtggtgtggttgatgacgcacagacgcgctatctactggaacaaagtggcatccccatcttttacttaaatgggagttatgaggcgcattggcgccgcgtttcgcgtaatgatcgccgaccactggtcaatcaacttggtcatgatggtttacgggagttatatcacgaacgacgccctaaatattatcgtttggcagactacacgattttctttcaacataaaacaccgaatatgatgttgacggaaattgaaggacaactgccacgtattcaaaaaaaactggctaagcgacatgcttagtcagtttttttaatattaaaaaagcatatcattggctttttgagaccggttacttgtatgatagagttagaaagaggagggatgcccatgacttttaaattaccagcattaccgtatgagtatgttgctttagaaccctatatcgactccgaaacaatgcatcttcatcatgataagcatcataagacttatgtgacgaagttaaacgcagccttggcaaaacaccccgacttagctagcaaatcattacacgacttgctaacacacattgatgatcttcctgagtcattacagacaccgattcgcaataacgcaggggggcacgctaatcacagctttttctggcgaattttgactgaaaatgccccactgatgccaacaggtgaattattagaaaaaattgaagcacgttttggcacctttaaagattttcaagctgaattcaataatgccgcactaggcgtttttggttctggttgggcatggttagttgttgaccacgacggtgaattgcaaatcatgaccacccctaaccaagattcaccaatcatgagtgggaatcgcccattgatcggtcttgatgtttgggaacatgcttattacttgaaataccagaataatcgaattgactatatcgaaaacttctggaaaataattaattggccgcttgtggcggagttaatctaagcagcggccaatagatgacaacaaccggagtggtttcgtgcgtttccgctgggctgttgtcattttttgtagataatcaaaaaagcattcgctgaaactagcgaatgctttttattttagagattactatccgttgtaaagttcaatggtgagaggtttgcactgtccgtaatgagcttaacagtgaggcgttccatttcatgttgtgcaagttgggccgctttagcggaacctttggttatcaacatcgtccgttggtgcgcatcggtttcagctgcaacaagcttgtcagtagcaacgatattttgaaccatcaaactgttgatgtgtttttgggtttgttctaagtctttagcgaacttagcgtagtgggcatcgactagaataccagccaatttgtaggtccaatagattgaatcctttgagtaatcttttgtacctttttggtagttgactgggacatcatcagcaccggcgtaaaatggcacgtagacgctttgggcagtcacacccatcgctaaccagtgaagaccgctgacatcaacagggcggttagggcgcatttgaagaatatgtgactcttgtgttttcgctaaactaattgggcggaaagcatgtttttgttgtggtgtgccgtgaccaattggatcgtaggcggtcccttcatagtgcgagcctaaaatctgagcgacatcttcgacttgaataggtgcatcaggttggcgtaagaagggcaagttaaagtcttgtggttgttgttcaacagacggtgttaaaagcttttgaccgtaccaaacacgtggtgtgttgtaaacgaggtcgctttgatcttgtgtcccaaagatgttgcggaaattaaacggtgtgccagcttgccagaggtggttatcacgggtaaagttttgaagcccctcagaagtcatgaaggcctctggttgatcaaaatcaacttcttgaatggccagttggttggccacgacagcgtaactgtcatcaggaattcgttgcgcgacccagtgatgaccactaccaatttctaagtaccaaacttcatcaacgtctgaaaaaaggataccgttactttcggttgtgccatattcactgacaatcgcacctaaacgagcaaccccttcgcgggcagttttcacgtatggtaaaacaacagtgatcattgcttcttcagcaatgccgttatcgatgtagggatcgaagccgagtacgcgactattgctataagcactttcggtcccactcatagccacgccgtattcattgataccatcttcttcgaataagccgtattcatcggtccattctggggttgcggtatatttagcggcttctagtggtagatcaagcgtaaagccggtgtcttttgaaacaaagtgaggtgctttcgttaattgttggtggggatgaatcaccatgtgtttaggccaagcagcttggctatcttcgttccgtgcgattaaggtcgagccatctgcgctcgcttttttaccgaccagaacactggtacaggcggttaattgacgataaaggggttcactcataataatgcctccaaataaattcgatattaatgctcattatacaatcttttaggggaaaacacagcaattaccgttgcccaattgcgctaaaacaggcataataatagtattcgaaaaaaggaggctattattatgccattagtacacatcgatcttattgctggtcgtagtcaagcacaattaaaacaactttgtgctgacgtgacagaagcaatctcaaaaaacacaggggcacctgcagaacacgtgcacgttgtcttaaatgaaatgcaaccagaccgttactcagtaggcggcgttttaaaaagcgacgaaaaatagagtgtaactcgagctggttaggctttgaggattaacagtaaaattgggaattatggggggttcgccatgattcccaattttgcagttaaccggaaaaggctgctcgaggagcacgtttaagccatttaaaaagcgattcaacaatttagtcggatcgctttttgattagtccattttaaaatattggcgtaaataatttgctacaccgtcctgtgcgttggttagtggggtaatgtcatctgcaattgctttaactggtgcaatcgcattttgcatcgcgaccccggtaccggcataggccagcatgtctaagtcattactttcgtcaccaaaggcaataatgtcggcttggtcaatttggtaatgatttgctaaacgttcaagcccagttgctttttgaataccgtggtgcacgatttctaagacgcttgctgggccaccccacgtattaacggaaacttgggggaattggcgtaaaatttcggcccgtaaagcagcttggtcctcacgttcgacaaagactgttacagctgctggatcttgttggagtgatttacgcgttagaatttcatctgatttgagtgttgcggggaaaaacgaaaaagtattgctgtaagcttgatcagctaaaaacattgttttcccttcagcggcaatcatctgaattttaaaacgttcttttaattgaaagagactaaaaacgacatccttattaatggtgtattgatattcgtcggaccaattttgcccaggaatatgcatgagggcgccgttaaaattgaccatcggtgacgtgcgccctaattgatggtagaaaggttcactcaagcgattaggccgaccagtcacaatactgacaatgtggccagctgattgtagttgggtgagtgtttcttgtgttttaagtgaaattttggcttctggatttaaagtcgtgccatccaggtctaaggcgattaatttttggttcatcatagggcctcctttaaagggtacttaagctatcattctagggataaacgattcaattgtcaattaacctgtattgtatctaaagcggttaaacagtataataaagctattgaaatagcgtaggaggcagtcagatggcagatgaagaaatgaacacgcaacaagacgattcagcaatcgaagatttaaaggaacggattttagcagcgctagaaaccgtgattgatcctgaattggggattgatattgttaatctaggacttgtctacggccttaacctagatgaaaagggcctatgtacaatcgatatgacgttgacgacgatgggctgtcctttaacagatgtcttaacggattcaattcatcaagcacttgcgaaagtcccagaggttaaagatgtgaacgtcaatcttgtttggtacccagcttgggatacaagtaagatgtcacggtatgcacgaattgccttagggattcgttaaactatcagtatgaaccttctcctttcacctgagcgaggaggttttttatgttatttagtctaagaaatgagtggaataatgacccaagaaacctacctgtcacagttaaagcaaagtgccgtctttttcaaaaacgtaccgcaactaacagcgcaatttcaagcgatcaaagcgagtttaacacgtctacaacaaaaacagttaccacagcacaatctcccagtactcgggattgacgaatcactctatctaacgttattattggcagcagagcagggtcaattcaaggcggtctcttcacagcaattacaagcgcaaattaaaaagacggatcatttactccgcaattatcggcaatatttgcaaaatcaatttggcatgtgggcttatatcagtcaggatttgacggatagtatcgtccaacagtttcccgattggcgctttttggaaattatggctggtaatggctacctgagtgccggtttaagggcggcaggtgccgaatcggtcatttgtacggatagtttggcctggacgagcgaaaaccagacagggcggcaattattgacgcaggtggcacctctcgatgcacaggcggcgatcaaacaatatggtgatcaagtggatgccgtattgatgtcgtggtcgcccaacggtgtgccgattgatttagccgttttaaaccaattatggcaattagaaaacgggcccgtccttttatgcttgggtgagcgctacggtgccacaaatagtactgaattctgggatgccgctcatttccataatgatcaacgcttatcgcgggttaatcgctatttacgcccgtttgatttaatgcgtgatcggttttactggattcaataacgtatcaaggaggaatcagcgtttgcgtttaaaaaaattagtgcttgatgttctatttgtcggggtggtcgtcttaggcctcctcgtcatcagtcagcgagccaaagcgatgtacagtgaacgacttaatcataatagtttatcgcaaaaggcggttatctttaagacgaagagtcaccaatcgattcaatcaacgatccaagcgattgatcagacgaaactcaataatttccaagtgcaatttaatgtcaataatcatttatcctatgtttatgctaaaggtaagcaagctaatgtgccgctcaaggacggtcgtttcttctcaaattatgattttaaatcacgaattccggtggtggtcgtcggacaatcccgggtcaacgaactctatcaaccagctagccaggcttattatcagactaagaatcgttacttgtcagtaattggggttgtgggtaccaatcagaccacttcgcttgaccaacacgtctttatttcggcttcaccagagttcgttttgaacaaccgctcgctaaaccaggtaaccgtgttagtcgatgatcaacaaatcggggcgcatcttaaagaatatcaaaagatctttaagaccaaatcaatctccaatttaacgcctaagaacacgccgattattggggtcaactggttgcgagaaaatgggacggcagcgatcatcctggtcttgctaatcatagttgctggggtgcttagtcatttatttgcgcaattggtcaatggctatcacgctcaaaagaatttgaccgctagcctttaccgtaaatatagcatgggacaaacgcagatttttgcagcacatctcttaagcatgacactgatcggttttattattggtagttggttcttctacttaacacacttgggtattattttcagtgggttagtggtagttgatctggttttaattacttatttctactttagaatgacgcgcattaaattagcgcactaaaaaagcaagttagttgctagacaactgacttgctttttttgtatttaaagtgataaatgtcgttcgtttaaataatgtcgtaaattagggcttaagatcatgggtgctgattgaagtgctgttaggtttcttgcacccaacatcgccatgattgactggatttgagcctgccaggctaataattgttcagcagtttcagtaggaccagttttgagcagcatgtgtaaaatttgacctgaaatcccaactgcagaagcgccaaggcgtaatgctttgacgatatcaagcgggttacgaatcccgccagacgccaaaattgttaattcattttggaaggcttgtgattcgaagagtgattcaaccgttgattgcccccaatcactgaggtagtcgtaagctttatctcggcggcgttcattttcgattgtgacaaagttggtgccacctttgccggaaacatcgatattggtgaccccaacactttgcaatttagcaatcgtttcggcgctcatcccaaaaccgacctccttaataattacggggacatctaagttggcgacaatttcgccaatctggtcgagccaatagaattcacggtcgccttctggcatcactacttcttgcgcggtattaacgtggatctcgagggcattggcttgggtcatggccaccgctttttgcgccactgctaaatcattaccagcaccgatattagcgaggatgaaaccggctggattaaactcacggatgacactaaatgtatcaacaagtgtcgggtctttaatggctacggattgtgatccggtcgccattggtaaccctgtaatctgtgccacttgtgctaattgggcatttagttttttagtttgttggcttccgccagtcatcccgttaatgtaaaaggggctttgccaagtggtttcagcaaattgagtactaatatcaacgtcggcaatcgctatttcaggtaaactttgatggataaaacgaagcccgtcaaaatcattttgacgatcttcttgatgaaatttttctgctaaaaagacatgttcatctttacgatgcgattggatggattgttttggtctcacgatgttggtcaactcctaatctacaaggtgaacggcaaggtttaaccgttcgatttgattatcacgccatttttcaaagagtgacgttgtatcaattgcccgatcaataatcacaatcccacaatcaccgccgccagcaccagatgttttagcagcaccgccagcttcttcagcaagggcgcccattttctggagcacgggggtttcaattgcgacgtgactaaagtcggctaattcttgtaatagtacgcgattgtggcgcaattcagtttggatttgttgtaagttgttagctcggaatcctgcaaccatgtcttctaggcaggctttgctagcctttaagaagttttgatagtcagcttggcgttctgtttttgccagtgcgattttatcgaccaaatgagacgttgaagcgggggaacccgtccaaccaatcaagagtgataattcaacaggtggtgtcaataactcgattgataatgacggccaaggaatcgccaataattcgttcaacgtcatcgttggtctagtctctgccaaccattgcttgtcaaaagaacgataggcaatccaaccaccgtaaacgctagctgcaatatcacctaaagaaccgttgccttgcacatcaagatgggcaattgcagccagtttatagagttggtcgttagttaattcgagttcgtaaaaagcacagagcgctttgactgtcgctacagtgacagctgccgaactaccaagaccatatttcttaccatcggccgagtctaagtcactgttaacccgtagatgatagatacttaatttcttacccgcttggcgggcatattgttccgttaatttaatggcggataaaatataatgaaaaggattgtcacggttatcaaaaaccatttcatcaccttgtcgttgccaatataaagaattttcttggtattgctttgaaacaatactgccgtattcttgactctcttcaattgaaactgttacaaattgattcaaagccacaataatagccggaaaaccagtttctactactgcgtattcgccagcaatatacagcttcccgggtgctttagccgttatcaaaccatcagaacctttcacatttaacttattcattatgctcacagataggtcacgcccggtcctggttttgcaaccaataattgctcagctgtaaagtagggcgcaagagctgccaagatctgtggcgtttcgcgactcgtacaaatcactttcacgtttggacctgcatccatagtataatagcaagaaaccccttgttgacgcaagcgctcaacgacttctattgcttggagggtttcaggttcgaaataagtgaaaggtgggatggcactaagcgtcgttgcgtgcatttgcatcgcactcttttcagcgagttgtcccactaaatttatatctttcttaacgattgcatccttcatcttaggtaagtccgcttgagctgtttcgacccaactaggataatatggtgaagttgccacaacgcttgccataccggctcgactggcaacccgtttttgacgatcatttaaaacaatcgcaatcatttgaatatcccaatcaatttcttcttggacgggaatcgcgtatgaatcttgatcattcgtgcctcgttgccattcgacaaacccaccataaattgagcgcgtcgcagagcctgaacctcgacgtgcaagtctggataagtcccgtctgtctaaatctaaaccggccgcacgactgccggctgctgctaaagcagcatagccagaagctgaagaagctaatccggccgcatttggcacgtgattagtggtttcaacactagcaaaagttgaccgacctgcttgttggcgaatcaggtctaaaaactgactcattttagtttgggtttgttcgtcggcttcttggccattaaaaataatctgatcacgcgtcaatgtttctgaaaacgtgacagtcgtatctgtataaaaatgatctaacgtcaatgataaactgctattttgcggaataatcaagttggcgtctttttttccccaatatttaatgagcgcaatattagtgtgcgctctcgctgtggctaattgtcccatagtgataactcccaattgttgtttaattagtatgtagtgcgtgtaatggttgaatccaagtcttaatcgcgccggcttggcgtaattgttgtgcaagccgtttggcatctgtttgtgttttagccagtgcaataatgcaaccaccacgtccgccaccagtcaatttagtccccaagctaccggcttgattggcagtttcgattaaagcatcgatacgtgaattgctgacccctaagactcgtaaatcatcttgcgctaagctaagattctggcccagtgccactaactgattttgagcgatattggttgcgacagcttgactcaattccccaatgtgggtaatgagcggctgagtacgttcaggatttgacatcatttgattttgaacgcttttaacggcgggaccggtttgccccttttgtccgctgtcagcgattaccaagtagccttgaaggtcaatcggtaatggttgtagcggttggcctttaacaaaccaaaggggggtcgttgcacccgtggtggccgcatcaatgccacttggattaccatgaatcatattttctgaaagagctgctagtttaagtaagtcgcgttggtttaattcttgatgataaaaagtaaagagggcgcgaataatcgcaatggcggtggccgcagaagagcccattccccgttcagctggtaattcactttcaattgtcagttcaaaagcggtttgctggtcgtctaattgttgccagagctgttcgattaatcgacgaataccttgcatctgaccaatcgcttgacttaaagggccactgtaataagggctgttaatcaagggttcgctcagtgttggttgtgccgtgacatgaaccgttgtctggactgcaaaaataggaagcgcaatcgcgggttgcccgtacacgacagcatgctctccaatcaaaataatcttagcgtgactgtttcccacactcgtttgcatcgtatcacccttaatcatcaatttctgaacttaatcatactgttactactatactgcaatttaaaagtgactgccacaaacagtctataaatagtgaaaactatttgaaacactagtagtcagtaatgattgacctcgaagctatcattttaccagaacgatgctttaaatagccatcttaattgttaactttaaagatttttataggttgttgtcacaataaatcacagcataaaatagggttgttttatggtaaaattagcccaaaggagtggtaataatgagcttaaaatttattctaggaaccgcaagttatgatcaccaccaagcgctcgtcactaacttgaaggctactttccaagaaaaaccgcaagaacgctatttctatttagtgccgaaccatattaaattcgaatcagaagtttctattttagaagcacttaagtcagatgaaaatgattacgtcgccgcttctcaaattcaagttttttcattgacgcgattagcgtggtattttatgaaaaatacgccgtattaccaaattccgcgtatctcgacggccggtttaaatatgttggtttttcggttattgcaggaacatcaagaacaactgcaattattccgtggtgaggtcagacataccggctttgtggcccaattaacaaaacaattacttgaacttaagattggttgtatcacaccggcagatttaactgcgatggctgaaaatctcggtgatcaacaagtcgaactcgcaaaaaaactacatgacctaaccattattgcgaccgcttttgaagcagccatgcaaaaacgatttattgaaaacacagccctaatcgatgctttgaccctctttttgcagcaacaaacgctaacagattgccatttctacgtggaaggctttgcacaatttacagcgcaagaacaagcattattaaccactttgatgcaacaatcagaggtacaaatcggatttatcttagacagagcttaccctaatcagcaacctgatggtctaaatttcttctttcaagctgggcggacctactataatttatatcaacaagcacgcctgaatgctgtaccagtcatggtggatcaaatggcggccaagcagcgattaacgccagctttagcagcgcttgatcaattttggattaattctgaaagctccggtaatcgaaaactaagccccgtgccggttactgagcatttgcacgttgtggctgctgaaaatcgctatgcagagttgcgctatgtggctcgtgaaatccggcgcttagtccaaactggccgttatcgctaccaggatttcttaattttgacgcgtcacttagcaccatatcaaacgatgatagccccgattttaacggaatatgagattccgtacttctgtgatttaccacaaacaatggcagcccatcccttagtatcactattggagaaattattggatgttaatctgcatttttaccggtacgaagacgtcatggccttattaaaaaccgaattgttaattcctaaaggcatgtcgatcatcgattttagggctgatttagatctctgtgaaaatttaattctaaaaaatggctatgaaggtaaagattggttaagtgatttagattggcaattttatcgtttcggttcttaccaagaaggcacgcgcacgactcaagatgaagccttaacggaacgcattaatggtattcggcgctatgtacagacaattttgcccccgttttatcgtgcactgaaagcagccaaaacggggcgccaagtggcccaagtactctatcaatttttgattgaccaaggcgttgatcaccaactattaaattggcgggaccaagcattggctgccaatcatgtggctcaagccggtcaaccggagcagacgtggtcgacctttatacaaatgcttgatgactatgtcaccttgttaggagacgtttcgtttgaagaagaagataccgaccggttaaatgaatttaagcaacttctttcggccggttttgcggcagctcaatatgcacagattccctcaacgcttgaccaagtggttctctcagaatccggaatggtccagaccaagcaacgtcagatcacctttatgattggggcgactgatcaagttatgcctgatcaaattgagaatacggcattactaaccgatcaggatcgtcagcgattgttggataatgaagggcaagccacgccgttattaaacgaatctagtgtcggtaaaatgaacgctgaaccttacttgaactacctcgcttttttaagtagtcaaaccgcggtttattttacgtatccattaggcaatggtgagggaacaactttcaaaatgtcaccttatgttgaacgcattagaaattattttaatttgaccgttcaaaaggtcacggctgaaccagcattacaaaccacagaaattccccgaggatcatggcgtagcttgttaagtgatctcattcaagtcagtcgacaagcgcaagaaaatcaagcattgattccgaaacagtggttaacgacctatcgactcttgcaacaagcaccgcaaagtcagttcttaacaacgcaattattccaaagtctcaattatcgtaatgagccagagcgcttgacaccggaaattgtcactggtttatacggcaatgaaatccacacatcgatttcaaaactagaagagttctatcaaaatcagtacgcttatttcttgaaatacggtttgaaattacaagaacggcctgtttttgaattaacaccggctaataccgggaacttttaccacgaagtgatggatcgctttattaagctgattcaaggccaacaaattgccctgccagaattggatgatcagcaaattgataaacttgtcagtgaagtcttggctaaaacctatgagcaacccgagtttaagattctcaataaaacagcgcggatgggctatattcgtcagcaattaacacaaacagttaaacgcgtcagcctagcgcttcgtaatcagagtctttcaactaacttacggccgttagcgaccgaagttttatttggccaagtcggtgcagaaaaagggctccaagggttaaacttcatgttagacgatcatcgtgaagtaaaggtccgaggaaagattgaccggattgatcaattgactattaataaccaaccttacttagggattgttgattataaatctagtcagcatagttttaatttccgggatgcttattacgggttggccctgcagatgttgacctatctcgaaacagttttgcaagatcaacaggctattttgccggccaatagtgcggtgaaacctgccggtgccttttacttacatctgaagaatccgacattgaccctcaaacaattaactaagaaaaaaatgggtcaactccaaaaaggcgagttcgatcaaatgttattagatcaatttagatacaacgggctcatcgtcaacgatgaggaattactcgaaaatctcgatacaacgcttgtcaacggccaatcgccactctttgccttcagtaagttaaagagcggtaagtttagatctaaacaactcgtcacacttgatcaacttgatttattgatggcacataacgaagacttaatcaaagaagcgggccaggcgattttcgctggggacacagcattgaatccgattatgcgtccggatcgaacgaatgccctaacgttgtcaccatttaagtcaattttccaattcgatgcgatgttacctgaaaataattatcgtcaactagaagcattagacgaaaaagcagtcttcgaacgcttaatgagtaaaaaaggagatggcaatcttgagtaacccccaatttacaccttcacagcaagccgctgtcgatcatgatggccacgatattttagtatccgcatcagctggttcagggaagacatccgttcttgttgcacgggtcatccagaaaatcttaaaagggaccgatgtcgatactttacttgttgtgacctttacggaggccgctgctactgaaatgcgccaacggattcaagcagctctacgcgatgctagcgagaaagcgacagagccagccgttaaacagcgcttacggcaacaattaagtctcgtgcctaccgcacaaatcagtacactgcatgccttttgtttaaaggtcattaaacaattttattatgtcattgatcgtgatcccgtattccgcttattgagtgataccgcagaacgactcctattagcggatcaagtatggcaacgggtgagagaggccttctacaatcacgaatatgtcaaagaaaatgaacaagatacattattctacgaattagcccaaaatttctcgaatgatcgtaacgatgacggcctgaccgacattgtttttgagttgctcgattttgcaaacgccaattccaacccggttaaatggttaaataaactacctaagagttatgctgttgatgaagctggtttgactgccagtgattatttccaagaaaaaatattacccattttacagcaaaccatcaccgaatgcttggaagccttacaagaagctgaacagctcagtaaaacaagcgaaaatctaatgatttatgcccctcaaattgcaactacgcaagcagccttaacacaaattaacgcagatgccaaaacgttaaattggcaagcatggcgccaacaactaacggatgcccagctaggacctgctaaacgcactaagaaattagagcctgatgaacaaattaataaagaccgtctgaaagccgatttagatgatgtcaaaaagaaaatccaaacgttattagacacttattttgtgtttgatgaagcaaccaccactaatattcagcgccaagctggccagttggtccaaaaattggtgcgcgtcacgttaactttcagagaagcctttcaagccgaaaaagaacgacgccatttattggactttagtgatttagaacaactctgtctgacaattttatcggcagaagattcaccagcaagagccttttaccaacaaaaatttagcgaagtgctagttgatgaataccaagataccaatccgctccaagaaacgattatccaaaaggtcacttctgatcatccacgcaatctcttcatggtcggggatgttaagcagtcaatttatgctttccgattggccgatccaagcttatttaagaataagtataacgaatttggtgtcacggaagctgaacgtgatagtgaacgaatcatcttagctgaaaacttccgttcgcgccgcaatatcgatgactttaccaatctgatttttaaacaattaatggacgaaaatcttggtgaattagactatgacgaaaatgccgccttacaatatggtgctcgttattatcctgaccagcacccaaccgcgccaaccgaactcttgctttatgaaactaagccggaagaggcagttgccaacccgcaattagataagagtgagggccaagtcgtggcggtcgctaaacggattcaagccatgatgactaatggggaacagatttgggataagaaactcgaaaaaatgcggccgattgaatatcgggacatcgttttactagccccaacccgcggtaataatttgtttatcctggattactttaaacgcttcggcttgccggttgtgattaaggatgcgcaaaattatttccaaacgactgaagtccaaattatgttagccctacttcaggtgattgataatcctaaccaagatattccactggtcagtgttttacgctcaccaattgtcgggttaaacgaaaatgaattggcattaattcggattaacgataagacggatgattattatcaagcggtctttaactttattgaccaatataatgagcagaaagtcggccacttaggccaacaagtgatgcagaagctgacgcacttcatggctttattgacgtcgtttagaacaatcgctcgtcaacaaccgattgtggacttaatttggacgatctaccaagaaactggctttttagattatgtcggggggatgccagctggacgtcaacgtcaagctaatttacacgcgctttatgaacgtgccacggcgtatgaagaaaatggttttaaaggactcttccagttcattcagtttatcgaacgtcttcaaaaacaagataaggatttagcacaaccaacgagcttagaaaatcaagacgccatctctgttatgaccattcacgggagtaagggacttgaatttccagtcgtctttttaatcgatacgagtcgccgctttaaccaacaggatttacaacgctcatatgttttggataatcatggtggtttaggggtcgtttatttagatagccaaaagcggttgaaggtaccaacactgccagaattagcgattaccgcccagaaacgaaaaaaattacgagcagaagaaatgcgaaaactatacgttgctttgacacgtgcggaacaatggttaatcatcgttggccattgtgataaccaggcccaattgatgaagcaatggcaaaaagggcaaaatagtacccaccaaatattagatgatggtgttcgcaacgatgccgcaagtttactggactggataggtcttagcttaattcgccatccacaagctaaagattggatcactgattatgagccactactggctttaagtggtgatcaaaccgagtttaagttgattatgactaatgaagccttacttggtgaaataccaggtagcctgcataacgatcaggactgggggcaacaacagcaaaaggcacttcaaacaattgatttaaacagtgggatagcaacagcgattgctgagcaattaacctttaagtatcccgctaatgttgcgacccaaacgacggcttatcaatctgtttcggaagtcaaacgcctttttgaagaccctgataataccggattgggacaattagacctagcggctgaacaaccgcgccaagcaaatcgctacgtaacggatagcttagcgcaaccacagttcttacaaaccgttcaacaaccaacggcagcagaagtggggaccgcaacgcatttggtcttgcaagaaattgatttaacgcaaccagtaacgctagcgagtttgcaaggtcttgtcgatcgacttgttttacagaatagtttaagcgccaatgttgcggctaagattaatcttaatcacctattaaccttctttgaaagtgacttgggacagcaattattagcccatccagaagcggttaagcgggaagtgccattttcgttgttattaccagcagaaacgatttttgaaggcattcgtcccacagatgacgaccacgtcctaatccatgggattatggatggttatttattgactgacgacggttgttatttatttgattacaaaaccgactttattgaccccagtgatcaagaagcggcgattgaacgggttaaaaaccgctatgctggccagattaacctctatagcgctgctttaaatcagattgtccaaaagccagtgacccataaatatctttatttattgtcaattggcgaactggttgagattaactagactggtttatcagcgccattcatagtatgattaacattaattatgagtaaagtattggtgacagcatgaaccgagagactatttatgccgttgttgatttggagacaacgggaacgaacattaaagatggggaccgcatcattcaatttggttgtgcccttgttcaaaacggcaaaattattcagaccatttcacaagatgtgaatccactacgcgacgtaccaactaaaattcaacatttgacgcatattacggctgatcagttagagttagccccaatctttgaagatttggcgcccacattagttgaaattttatctggcactgtttttgtggcccataatattaattttgatttacctttcttaaatggcgaattaacgcgcgtcggcttacaaccattagatttagcaggaatcgatacggttgaattggcccaaatcatcttgcccgaggcgcctagctatcgactacaggatttaacccaactattagagattgaacacgataatccccatcaagccgacagtgacgcgcttgtaacggctaaacttttcttgaagttaagcgcccgcttacaggctttgccatcggtcacccttaatcgtttgagtgaacttggtgagggcttattgcgacaaacaggtgatttctttaccgatactgcccaacagatgcgcgaaaaatcgcagccactccccaacgaattgttaattcaagaggagattgcactccgtaaacccgcaccggttgattttgaaatctaccctggttcgagctatgcggctcagtatccagtgactgaagctgaaaaaaagcgtcttttaaaaccacatttgaaatggcgtaaggcacaggcgacgatgatggatttaatccacgataatttcgagtctgaaacaccggaaccattgttaattgaagcagcaactgggttaggaaagacgattggctacttactcccgtatagttatcggatgtcacgtgatcataaattagtggttgcgacctcaacgacgctattacaagaacaaatcctaactcaggccaagccactgctagagcgcttggttggtcggcaaatcaatgcggcggttgtcaaaagtgcgagtcactatattgatttgcatcgctttgaattatcattgcggttaccgcataaaaatcgaatgattcgcttgttgcagatgaaaattttagtttggttaacgcaaacgacgactggtgatttagatgagctcaatttaaccagttacaaaaccccattttttgtcagcattcaacatagaggtctggctagtttgaacccccaagcaccgttttatcatgaagacttcctaagacgattgacacaccggcagcaacaagccgaattattggtgaccaatcatgcttatttagcaagtcacgcggatgaacaacaaatttgggggccaaaaccttacttggtcttagatgaagctcaaaacatggtgtttaacgtgcagaccatttcacaagagacttggtcgttgtccagttggcaattttgggcccaaaaaggactccaatatacgacaggggcccaaaccaataatttggtgcgactatttccagcggaaacaccgcagaatcgttcattgaagttattgcataagacattgggtaagttgacacggaccttaacgcatttagaaacttatctaacggagcagtttgagccagatgaaccaacagatggacaaacttttagtgaacggtatttaaatccagacgaagtcattcaattcgttaatgctagtcagcgtgagtttggccagttaaatcgagaattgttgacgattcaagatcatttcttggcgttacgctatgtcctagaagatcagttggcacgttataccgaatctgatctagcaatttggcaatcttttgaaaatgaactcaatctcttattagcagatgttgaccattatcaacgctttgaacaactattcattgcgacgaaaccgcaggaacgccatgcgttagcgattcaaattacacggcctagtcaaccgagtcaattaccgcaatttaaattacactggcaattgttatcggctgggccccaaatgcaacaagtattaagccactttgaacctgttacattaacaggcgcgacgctagcggttaatggccatttcgactatctcaaacgtgaatttggttttactgaagagcaagccttacaaactaagaagttaagaagtccattccgctttaaacaacaagcccgtttttatatcgcagaggatggcccggttcaaaaagaactaacaccaagcgattaccatcaacaggtagcagcgcaagtgatgactttaattgccaataatccgcatcaaacgctcattttgtttaatgccaatcaaacattagaacaagtttattacgcattaggtcgtgctgggttatcactcgatcgtgaagtgttggctcaaggcattaccggcagtgccgaaaaaattactaaacggttcatgttaggacacgattcggtcttactagcaactagtagttttgtctcaggggttgattttcctgaggccgcccttgaaatggttattttggttcaattaccatttgatgcacccaatgcattacagacgcgtgtccgttatgcacaattatcagcccaagggattaatccgtttaaggctgaagcactgcctaaggcaacaatccggttgcggcagtcatttggccgcttaattcgaacgccaaatgaccgggggttattcatttgcctggatccacggttgttgacgacgcaatatggtcaacaaatgcgccgtgctttaccggcgagtctgcctcaaaaggcggcacctgtgcagacaattagagagctcagtgatttattttggttaaattctgactaagttctgggatttaaccgtagcaaaacttgttttttgctataataaagctattcaatgtagcaaggagagaatgcgccgtgcgtaaatataagagatggatatgggtatttttattagtagtcttgatgggcacgatgtttttcgtctaccaccaagcgcgctcacccgaagtcaccgcagaagcgaaggcgaccaagattgctaagaaatacgctaagctagaaaatccagatggtttttacacgtaccatcgcaatggcacgtattatacagtcagtggtcaagataaaaataaaaatggtatctatgtattaattaacgaaaagggcaatcatgtgaccgtttatcgtcaatcaaaagggatgactaaaaacgaagcccttaaaaagacgtggtccactaagaatcctcaaaaggtcctcaatattaactttggtttttataagaataaacctgtttgggaagtcgtttatcgcagcgacaagggccgcctttgttatttaacgcttgatttcaagaccggtaatacgacccaattaattgaaaatatctaggagttttgctaattagggctgttgtcgtcagtgttttgttatataataataattatcagttattttgaactgtttaagttaaattaagtcagcataaggagacagagtatatggttaaaaaaatcagtattattgacgctaaagaccatgtcgatgaagaagtcaaaatcggcgtttggttaaccgataagcgttctagcggtaagatttcattcttacaattgcgcgatggttcagcctttttccaaggggttgttgttaagagccaagtaagtgaagaagtcttccaattggctaaagacgttaaacaagaatcaagcatgtggattacaggtgtgattcatgaagatacacgttcacatttcggttacgaaattgaagtctcaaatattgaattaattggtgacagtagtgaatacccaattacacctaaggaacatgggatcgaattcttattagatcaccgtcacttatggttacgttcaaaacgcccatttgcaatcatgaagatcagaaatgaaatcattcgtgctacttatgaattcttcaaccaagaaggcttcatgaagatggacccaccaatcctaacgggtagtgcacctgaaggcacaactgaattattccacatcgaatacttcgacaacgatgcttatttgacacaaagtggtcaattatacgcagaagctggtgcaatggcctttggtaaagtctttaccttcggacctgttttccgtgctgaaaaatcaaaaacacgtcgtcatttgactgaattctggatgattgaaccagaaatggccttcatggaacaagatgaaagtcttgaagtccaagaaaaatacgtggcttaccttgttcaaaacgttatcgatcactgtgcctatgaattaaaattattagaccgtgatattgaccaattgaagaagtacacacaaacaccatacccacgtatttcatatgataaggctgttgaaatgttacaagcagctgacttcgatattaaatggggcgatgatttcggtgcaccagatgaaacttacttatctgatcaattcgaacaacctgtcttcattttaaactaccctaaagctatcaaacctttctacatgaagccacatccaacacgtgatgatgtctacttatgtgctgatttattagcaccagaaggttacggtgaaattatcggtggtagtgaacgtgaaactgacttcgataaattagaagctgaaatcaaatcaatgggcttagatattgaagaatatcaatggtacctagatttacgtcgttacggctcagtgccacattctggtttcggtttaggccttgaacgcgcaatcacatggatttgtggtatcgatcatttacgcgaagctattccattcccacgaatgattaacagaatcaaaccataaattaaattttgaaaagtatattttaaaagcatgtcgtcaattattgaccgacatgcttttttattttctcaaaacccgttacaatagaagtaatcatttttcaaaaagaaggctagtatatgaacgaattaacggcatttatagagggcggtcagcttagcgtgtcgcgcttattattacaacactaccaaacgctcagaatgtcttctgacgaactggttgtttatttacaactgagtgattttgccagccaaggggatacttttccagacttagcggtgattggtgaacggatgggattggcgccaacgcaaatttatgagttaatccatcaattacttaaaaagaaaattatcacgttgaactcaacggttaatgaacaaggccagccagttgatcattatgatctaacaccagcattgtccaagctcagtgtcctagctgtccaacaaaatcaggcagcattaaattcgcaagaaacaaatcaacgcctgtccgtttttaaccaaattgagcaaacctttgggcgcccattgtcgccacttgaatctgaaattatctcaaattggttggatttagatcattattcagctgaactaattcagctcgcagttcgcgaagcggtcttaaaccaagtttattcacttaaatatgtcgacaaaattttattaaattggcagaaacaaaatattcagactaaggaagatttacaagcgtatcaaaaggcgcatccacgacgttaatctgataagggaggtagttgaacatgttatcaaaagcaaaaaccagatgggccatgacacaactgtacgagctgattcccgatgcaaagggggccttaattgcggacagtccatttcaattattgattgcggtgatgttaagtgcgcaagcgaccgatgtatcagtcaataaagtaacaccccaactttttgaacattttccaaccccagccagttttgcggccgcagatctaaccgcaatcgaagccgacattcgttcaattgggttatatcacaataaagcgaaacatatccgcacttgttgtcagcagttaatcacggattttggtggcgaagtcccacaaacccacgcagaactcgagcaattagccggtgttggtcggaagaccgctaatgttgttttaggcgatgcgtttaatgtgccatcgtttgctgtcgatacgcatgttagtcgaattgccaagcgcttaacgattagtgctgaaaacgcctctgtacgccaaattgaaactgactttcaaaccaagctcccccaaaaagaatgggtgcaagcgcaccacacattaattttatttggacgccaagtctgcacagcacgcaaccctaagtgtgatcaatgcccattgttaagtatttgtccggcagggcaacgaatgctgcaagaacgcggttaaacactatttccaagtcttaataataaaaaaatagcctgattgtctgtgctcttattaatagagtgacaatcaggctatttttaattagtgtgatgttgtttgcgttgatattgatggttggctcgtcgattgactggttgcgggtgtacttgacgagctagcgggggcttcagaagaagaacttactgttgaagatgattcacttggtgtcgatgacacacttgaactagattcaacagagctactactttctgatacactgctttcagaggcggcaacactttgacttgagctttgtaccgaaatcgatggtgttggtgtttcgatgacactatgggttgatgaatatgaggagctcgttgaagcatctgaaattgcggcggtcgtacctttaacgaagagctctctaacaccggcaatcgttttagcttgaactgaactaggcattgtccaatccgtatttgaaacattttgtgaaaggtaaaccatcattgcgcggtaaatataggccgcaatgtttcgttcctccatcgttaaaccattttcgagtggcttgtcgtaacccgtccaaacagtaatggagtagtgcttcgtgtaaccggcaaaccaactatctttcgcaaggtctgaactgagtcctgatttggctaattcttcactcgaataatcggttgtcccggtcttaccagcttgatgtaaccctgagatctgtgctaacgtcccagaaccattcttgatgacgtctttcatcatatcagtcatcatataggcagttgagtctttcatcgcgtcagagccttcagaattgtaattatgtgtaacaccatctgccgtttcaactttattgatgtaggttggtttgtagtaagtcccgccattagcgaaagcgctataggcagccgattcttctaaggtagaaacgttcccaccaatcccataagcaagaccggtatcttcaggaatcgtaatccctaagcctttaacaaacttacgtgcacgcgtcataccgacatcttctaataagcgaattgcgggtacgtttcgagaattagctagcgcattacgtgctgtaattgtacccaggtagcggttatcgaaatcgtgcagttgaatgttggtacctggataaatataagctgtatcttgaagtttttgagccgttgaataattaagatattcaatcgctggtgcaaagtccatcattggtttcatagaagacccattactacgtccggaagagactgcccggttatagcccaattggacatcaccagttttgcgaccaccaatcatcgcaacaatcttaccgttgttagggttagtaatagtgacggctgtttgcattttgtcatcagggaattgaacggttgtatcgtcattaacggtgttatataacttcttttgcgcatccatgtcgatattcgtataaactttcaagccgtctttataaggatcatagccttttttcttgaggtctgtaataacttccttaacataggcatcagttgctttagcgttcgttgattcattggtttcagatttctgtgcgactaaaccagtgttaatcggaacagctttagcttcagtcgcctctgcttcagaaatcttattgttccgttgtaaggcatcgattactaaatcacgacgcgtcttggcttgatccggatgtgcataaggatcgtaattagcaggggactgtggcataccagcaatcaatgctaattgtgggagactcaattgttttaacgtcttatcataatagtacttggcagctgtttgcataccataaacaccattattcaagtaaactttattcatataatattccaaaatttgatccttagaatattgtcgttcaacttgaacggccaaccaagcttcttgtgctttacgtttgaaggtttgatcgctgttttttgttgaaaagaccgataacttgattaattgttgcgttaaagtactcccaccctgtaggcctaacgaagagtgcccagtaatgttagcaaaggccgccgatgcgattcggactggatcaatcccaaatttctccttataaaagcgccgatcttcgattgaaaccacggcatcttttaacgtttgtgggatttgatcgctgctagcataagtctgattagcagcacctaattgtttaaaagctttgttattgctgtcatagagcacacttgcattaccgttttgtaatttcgcttgtgtaatctccggggcatcttttgcataatacgcaaataagccaatacccgcgatgattagcgctaagagggctaataacccccatttgataatacggccaaatagcgatttagtacgctttttggccggtttctggtgtcttgtgacacgtgtgttacctgtttgattggcagacatgttaatttaaactcctttgtggtggcgtgcgattaattgatcgacggcctctaaatagggaatacttgggtttaattgatactgaatttcaaacccatcggcaacgatcgccgctagtggaattgacttccgaccaccagttgcttgattgtcccattgtgtaatcaataagtttgccggatacacaaataaacgttgcagtgggacgaacttcataatcacaaaacaaaccccgccttgttgtaagcaagctctaaaatgatcaatttgatgttggtgaaagttttggaacggaaatgacgttttattcttagtttccttcgcttcaaaatccacatagtgcccctgatagatgccattataatccgttgttgaagcttgcttaaagtaggcttccttaataacagcttgactacgtgctggataatcaaccttaacgatctgaataggggtgggtttcttatagataaccgcagcatcacgtagtcgataatattgattactatcgttgatctcttcttctaatgacataccgcgtttaccatataaggtggttggactagtatgtcgcccttgctttttaggctgttttgtttcatgatttgagtagggctgtccgtttggataatgaaaggccatcaagaatcacactcctgtgaaactattatagcaatattcactcaaatttaaaatcattaggtggaggactgacaattgaagcgattatggttaaccggttatcgaagctatgaactcggcgtttttggcgattccgatgagaaacttaaagttattaaatattctttaaaaaagcaacttaataattacctcgatgatggcttagaatggcttatcaccgggggtcagatgggtattgagcagtgggggattcaagttgcacaggaacttaaaatagattatcctgaattgaaggttgcgatgatgctaccgtttagcgattttggtcaacagtggaacgaacaaaatcagggtacgttgatgacgttaaaagcccaggtcgacttttgtgaacccgtcattaaagccccgtattctgggccccaacagttgcgccaatatcagcaatttatgctgacgcatacagatggtgcattattgtactatgatcgtgaagcgcctggtaaaccagaatacgatgctaaagcaattgagacctatcaagaacaacatgagtatcccaataatcaggtcgatttttttgaactacaagatttagcaaacgagttggcggagttagagaatcaagctttttagggcttttaattctttaataactttaataactttgctataatgggatttatggtatatttattataaatgaggtgtcaaaatggataatcaattagaaatcgaattaaacccaactgaaattttgaaaaaagaatttaagtcaaagatgcgcggctatgatcctgaagaagtcgacggttatttagatttagtgattaaagattaccaaacttatcaagaaaatatcgatcgtttaacggccgataatacccgcttatttaacaaggttgaagaacttaatcgtcaactaagtgcttctgacagtgttaaagaagtcaagccacaacaggcttcagcagcaactaactatgatattttgaaacgtttatcaaatcttgaacgtcacgtatttggtgctaagttaagtgaccaaaatggtgccgctcaaacaagagttcaaaatcattcacaatttgattagacaaatcgcttaagatgtactataataatatacattgattaacatttgtaaatcttgagtaatcgcggtctacatcagtaggctgaggaaggtccatgcccgcacaggctgagatgcttgtagtgttcgtgcctggcccaataagccagggtaccttaatggtaacggcggaaaaagcgctaaaacttcggtcatgcgttaatatccttaaatagtgccacagtgacggagcgtttggggaaacccaaacgatggaacgaggtaaaccccgcgagcgagtaacccaaactttggtaggggcgtctcatttatggaaatgaactaaaaatgagagttcgaaagaacagatagatgattactgaaggagctttcttcctggggaagttctggaacaaaacatggcctatagaggtttacaaacaggtggcttgggcttttgcccaagctctttttatttaaaaaataatttcctaaggggatctttaaaaaatgacttaccaactatacgctacaatggcaagtggtatcgaatccattacggctaaagaactacagaatttaggctacgaaacgcgttcagataacggtcgggtttatttcgaaggtgacttggcagatatcgccaaaactaacctttggttacgcagtgccgatcgtgtgaagattgccatcggtcaattcgaagcaaagacatttgatgacctttttgaacaagtgaaagctttgccatgggatcaatatttaccactagatgctgctttcccagtagctggtcgttctgtgcgttcaacactccatagtgaaccagatgtccaagccatcactaaaaaagcgattgttgataagttgagtaccgtttatcaccgtcggacgcgtttagctgaaactggttctgtctatccgctagaagtcagcatcttaaaagacatggtgacaattagtttagatacaactggtcctagtttgttcaaacgtggttaccgtcttgaaaaaggggaagcgccattgaaggaaaacttcgcggcctcattaattctccttagtcgttggcaaccagatatgccgtttgttgatccaacgaccggttcaggaacaattgcgattgaagcggccttaattggtcgtaatatcgcgcctggtatgcaccgtaagtttgcctttgaagactttgactggattgacgccactgttttagctgatgtgaaggctgatgctaaagcacaagaaaaaccagatcaagaacttgaaatcttcggttatgatattgaccaaaatatggttgatatcgctaagttgaatgctaatgaagcgggtgtcttacatgatatccagttcaaacaattagctgttaaagattttaaaacggatttaacgaacggggtcatcattgctaacccaccatacggtaaacgtttgagtgatcaaactcaagcgcgggtattgtataaagaaatgggcgatacttatcgttcattgaaaacttggagtaaatacattttaacaagtgatttacaattccaagaatctttcggccaacgcgcaacaaaacgtcgtaaactttataatggtcggattcagactgatttattccaatattggggtcgtccagtatggccacgtgctgaaaaagccgaaaaataagaaatttaaagtattttcccattatatcggggtaaatgcttttttatttgcccaaaatccattataattaagattacttcaataataaggtgagggatcgacttgacagtcatattagcagcagaaccaattcctgaacaacacgtagaagatttacagcaacaagggttaaccattattaatttggataacgtacaacccgaacaattggcaaccatcgatattatgtttggttggaataaaatggtggggcctaaaattttagcaacaccaaatcatcgcttgaaatggattcaagcagctagctctggtgttgactatttaccattagcaacattgagcgaacaaggcattatcgtttcaaatgccaagggtatgcacgctgttccgattgcacaaactgtgatgagttatattttatatttcactcgcggtattcgtcaaagtttgagttctcaagctaacaaggaatggcgccatcatgagattgggcgcgcgaccgaaacacttgagcaccgaacaattatggtctttggtaccggccaaatcggtcatcagattgccgtttacgctaaagcgttggggttaaaaaccatcgggattaatcgtcacggtgaaaaacgcgatgcgtttgacgaaattttaacggatcaagattatcaaacgaaattagctgatgcggatttcgttgtgaacatgatgccgttaacaccggaaacggaaaactttttcgatacggcattctttaatgcaatgggtgaagggcactactttttcaacctaggtcgtggtgcttcaattaatgagacagcgctcatggcacaattgaataatggtcatctcgcaggggccgcaattgatgttgcgcaaactgaaccattaccagaaacatcaccactttggacgacaaccaacttagttatcaccccacatatctcgggttacattccagatattcacgaacgactctttagaatcttcgaacagaatttaccagtcttcttaacggacgggcaactcgctgttaaccaagttgatttatcggctggttactaaaaaataagacttaacactatatcagtgttaagtcttatttttgtggttaaatttctatagaccaggaattggttccgctaataaacagtcatctgttcgatcgtaataactgacaactttttgggttagatcacttcgccaataaataatgccagcagctgcagctagctcacaaaacacttcaaaagtgatttgaccagtctgcgctttttggaccgcagctttaatttgagtggcattacttttaggggcaaccttttgtggcacaccattcattttaaaatcaagataaccgtcattatcgtaatagcgatattttccggattcaacaaggtaatcatatttaaggacacccatttttttaaaggcctgcattaattttggaaagtcactagcattctgttcagcgtcgaccgctttttgaattgcgttataatttaacatcactaatctcatttctattttttctttttagcgtacaacaattacgaatttcgaacaagtaaaatcgccttttttaaatccgtgatttgagacgttttaacgaccacttgtccgttagttaatctgaaatgcgcttaaaatgcgcctctcgtaattagtgtgttttaaacgtgattagaccggcctttgaaccacttctggtatttatcggtatgagcgcacgcttttggtagaaagaatgcgctcggaatccctttaaatcaacgatagtcaggggtgcaaaatacgaccgcatggtttataatgatataagtaaaaagaatgcggtcaaaaggacggaattttaatgcgaaaatcacgaactaaaaaaggcaaaaaattaaacgtacagcctttaaggaccaaagacgagattgaggacatgaaagttatcttacgacactcccaaatgggtagtcggaattatttactttttttattaggcatcaataccggtttacgttgttctgatattgtccaattaaaagtgaaagacgtaatcgaagacaacccggtcatcgtcgaacaaaaaacaggtaagtggcgccaaattagtttaaccagtttgcgaccctacattagtttatatattcaaaataatgaactgactggtaacgactggttattcgggagtcgcgtcggtgatagtcacattacagtcaatggtgtttatcgtatgttaaccgaggcgggtaagaaactcggccgcaatgatattggcacacatacaatgcgcaaaacttacgggtattggttctataaacaatttggtgatgtgcgatcattaatgattgattttggccattcaacacaggaaacgactttacattatattgggattacccaagatgaagttttaagtaagaaacaacaattggcaatcggcctttaaaaaaggcttgccttaaagtgagcttcaaggtgtatagtagagatatcaattatataagttgtaattgtgtttagaaatttcgctatataataggaagaaacacgttcaaaaaaattttgggagatgtttttatgaaagcagcaacttttattgaaccaggaaaaatggtgattactgaggcacctaaaccaacaatcgaaaagaagacagatgccgttattcggattattcgggcttgcgtctgtggctctgatttatggtggtatcgtggcctttcaaaacgtgaatcaggatcactagtcggacatgaagcaatcggtgttgttgaatccgttggtgaagcagtgactgatattaaagctggagattttgtaattgtcccatttacgcatggttgcggacactgtgctgcttgtttagctggcttcgatggtgattgtacaaaccaagaaggcggtggcaatggtggttatcaaggtgaattcctccgttataccaatgctaattggggcttggttaaaatccctggccaaccagctgattattcggacgaaatgttaaataatctcttaacactttcagacgttatggcaactgggtatcacgccgctgtttctgctgaagttaaacctggtgacacagtggtcgtcatgggagatggtgcagttggtttatgtggtgtaatcggtgctaaattattaggtgcagaacagattatcgccatgagtcgtcatgaagatcggcaaaaactagcactagaattcggtgcaactgatattgttgctgaacgtggggacgaagctgttgcaaaagtgatggcgctaactgacaacgctggggctaacgccgtcttagaatgtgtcgggactgaacaatccgttgcaacagcggtagccgttgctggtgcgggcgctgttattggtcgcgttggaattccacaaaaggcagaaatgaataccaacgtcttattccgtaagaacatcggcctccgtggtgggattgcggcagtcacaacccatgataaagcacggttactcgacgctgttttaaagggtgaaatcaaccctggtaaggtcttcacgcaacgctttaacctagatgatattcaagctgcttacgaagcaatggatcaacgccaagccatcaaatcattattagtgattagcgattaatcatttgaaaggaatggttgcatgattttccggttaattagtttaatttttgtcattttattactgcttagcttctggattaaaatcccatttttcaatgattaccgaccagttatgattcttatatatggtcttacttactatttcgttgatcgacatcagcgactaacacgctaatatagctcaaaaaagccgttcggataatttatccggacggctttttatgtatttttaaatgagtttaagtaaataaccacctaagcaaccaaagataagacttaataaactaccaattaagtagtattctgcaaaatgatgttcattggcttcaatggcgcgaaaccgcgtgagggctttgattgcgacgacgaccgcgatactcgcaacattattggtatagcataataacagaatcgccaaacgttctaagagaccgatgtgccgacccagttgtgctcggtctggtagtcgttccacatttaaatctaagctttttaaaaataagctgatgaaataatcggcaaaatataatgtcgcaattatcacacttgcggctaataaccaccgactaatcgtggttgactgccaattagtccctaataattgactaacaatgacaatcacaactaaatgcaaaacctgatctaaaacgtaactgattagagggacttgattgggttttaagcgtaatgcacgtttcaaaatgggttggcaattctgcttagtgacatcgattagccaatgcgttagcacgacgattattaagctaatgccgaacgtttcaagaaaaggccagtttgcaacacgcagtagcgttccgattaaccagatgccaaccaccattggcacttgcgtcaacgcgtgccccaataatgggtaccatttaacggccaattttgttgagcgtttgcaccgggccatctgatcggattggattaaaaaatccgtccagaaatgggccaatagcaaaatcgcaaataacgtcatgcgttcacctccgccaaactcattagttgcgctcgaaccgttgttaacgtctgctcaatgagcggataatccatctgattgagcaaccgactgatcttactagaagcgacagcacgctctttttgctgcgtataatccacttgataagtcagattaccatatgcttcccataaaatttgagccagctcataacgtttcaagttcggttgcgcataaagtagagcaaacgtctcttttcgcagcttcgtgtttaatagccgttcataaattaaataaaaaagggcactaatgccattagcggtttctgcagcctgatcagtgactaattgccacttaaaaagagaggttgaaaatggataaccgaggggtaaagttgcgccttgcattaggcgttttgcctgatcaaccgcagttaaggcattaacaattgccgaaccatttacgcgattaacatcctgataatctgccttttcaactgtaactagttttcctaaaccaacgccaaaatagaattcaggaaggtctactgacccaaaaagcggttcccaaaattgtctaaaagccacactgcgcaaataggcattacagaaaataaataaatctgccaattgcgcttggtctgccgcttgaaaaccacctaataacccatcaccatcttttaccatgaaaggggtgagtaaatccgggaaacgatcattcagttttttctgcaggtgctgtaataacgttaaaacttgcgtttgatcggcaaaattcgttcgactaccaactaaatcgataaaacaataagcagcttgcataatgaacctcctttggaaaacatttgattataagtacataatagctaaatatatccttaaaatcaaatgtttaattgaaagacttgcgattttatacgttagtgttatagttaactacataagtaactaaccaatcaactaacggaagtaggtgatcctttgttttttgaatttaataacgaaactcctatctatcgacagattgccgaccaaattgaagaagggatttttacgggcgttttcccaccagagagtcagataccttcaacaaccgagatatcgcgacaatttaatattaacccggccactgttttaaaaggcatgaatcaacttgtcgaaaaaggcttaattgaaaagaaaagagggcgcggtatgtttgtcacgacaacggcacaaaaacaaattaatcaacaacgacaagatgaatttttagatcattacgttgcagcattcattacagaagcgcaacaactaaaattatcgaaggacgacttaattgcactgattgaaaggggctatcaaaatgactgaattaacaactgaacatttgattaagcaattcggtaatcgggttgtattagatgatatcaatttaactttaaagccaaatacgatctatggcttactagggcgaaacggtgctggtaagagtacattattaagcattatagcgaaccaaataactgcttcaagtggcacaattaattgggataaaacaccgttaaccgggcgtgatcatcctttacaagccatttatctcatgtcagaacaaaacatattcaataaagaaaatcggcttaaaaagattatgaaagataccgccttattacaaggggccttcaatcaaacgcttgctgataaaatgttagctgatttcgaactcaatcccaaacaaaagcttaatcaactctcaactgggtatcggacaattttcaaaacaattgtcgcattatgtgtgccagcggattacgtttttctagatgaaccaattctcgggttagatgctaatcaccgcgttttattgtatcgctatattttggaagcctacgaaaatcgaccacggacatttgtcttatcaactcatattatcgaaaagattgctaacttaatcgaacacgttttaatccttgatcaatctcgaatcattgttgatgatgatctagaaacggtcctcgatcacagttatcaaattagcggtcccaaagaagacgtcttggcatattgccaggaattaccaatcttagcgagtgaacaaatcgggacactctacactaactatctctacactgagttacccgcagaccgggtgatccccgatcgcgtagcaatcaaacatgtcgatttgcaaacaatcttcattaaattaactgaaaaggggcgtgaacagcatgtttaaagcaatgttacgatatcgattaacggccatttggaaaacgttgctaattgcgttagcgattggtgccgtcgtaacaactgccagtgaattaattttaagcaaacaagcatttagtataggattactaggcgctagtttagcaatgaccggtttaatcgtcacacaactctgtctcattgtcctttcattcacaatgacccgaccctattttgagtttgggattctaaatggcatttccagaaaaacgaattatgcaacacatctggttagtctattaggtagtcagcttgtgacctttatgcttttttatcccgcaacagccgccatttttcaatcacacattgaagacaatacgaatctatttgatccgtatctcatgtttatcatgattattggtgcttggattgtgattgctagtgggattgaaattagcagttttatcactttatttgaacgtaagatttggtggattgtgattaccttatgggtagtactagatattctttttgaacattatgttcatcccgttattaattcaatcttacccacttggaccaagctcacagcgctcaatttcaataacgctagcattatgacagctgctaaagtggttgtgatgagtccgtatttctggctaactgttttcaccagttttgttttcccattgttagttgcgtgggtctgccaatacttcatgcaaaccaaaaaaatcgcgctcaagtggcgtcgttcagcttaattgaatatagtcgggtaatgatgatagtcattacccgactttttgttcccagattgttttttagtgttattttgattataatgaatacttatcagtactaaggaggctatcaatatgttatattcaccactttttgaatgcgatgtgccaacaatccgctaattccgtgcatttaacacaaattggaggatttacacatgacaatcactaaacaagcaatcttagagcaagcacaattggtaaccgcaacatttggatttactaattctaaaaaagatactgcattttgggacacgactttatcaccattactcaatgagatcgaagccgatttaacactcgaacaaattcgcgagttgcctaacatcatcgcgacgaaaaaagcgtacaaagcagtcggtcttgatgcagcacgtcatcggccatcttcggatagtttattacgccgcgtcgttaaagggcaggggctttatcaaattaatgcgttagttgacgtgaataattatctctctttgaaactacaactaccgattggcagttacgatttggccaaaattgacggcccaatcagttatcaagtcgccgaagaaggggccgagtacgctggaattggtaagggcgcgattaatatcagtcactttccaacactagtcgatcaacatggtgcgtttggcagtccaatttcggattccacacgcgccatgattgcccctgaaacgacagaagcgatgcttgttgtttatgctttcggacaatcatcagcccaattagcggcaattgaacaagccgttaaaaccgtccttcaggcagcctttaacccagaagaaatcacaactgaaatcatcgcgtaaaagaaaaaggggctaagacaaaagtaaattttgtctcagcctcttttatttatctgaacttttatagtctaaacgtgttctgtcagccaacactttccggttaaccgagttacggcatactttttttattgcgctaataattctactaattccgttttaggaatgcctgtaaagtaaggtgttgtgtcaattggttcgagggctgctgctaagtgttcacggtcataaatcgttccggctaatttttctgctaaatcattagcatcacctgaaccaaagaaatcgccgtagaatttaacgttggcaatcttaccattttcgatcaataagcgagcatcaatcgtcccaaaatcaaagtgtttccgcttttgaattgttgatttaggtgacttgccataaacccagtcccagttactatagaggtcattgaaaatcttgtcgatggcttgttcatctgccgccgttaattgatattcacgatcagcaatttctggtaagctcttggcattaaaaaggttcaagagtaagacatctctaaattcttcagtcgacatattttgatattcagggttcacgtggtcttttaaattagttacccgttggcgaatggacttgatgcctttagaagcaatcttatcagcagggacgttcaacgcttgtgtgaggacatctagatcgacgttccatgaaagggtcccgtgagagaacgttttgccatttttggtatacattgcattgccagagaatttcttaccagcgactaacatatcgttacggccagagacttcagctgatgtggcgcccatttcgtgaagtgcatcgacgattggttgcgtaaaggatttgaaatccccaaattgttctgaatcagcatcgacaacgaagctaaaacagaggttaccgagatcttgataaatgccaccaccaccagataagcggcgggtcaccgtaatgtgattatcttcaacgtatttttgattaatttcttcatacgtattttgattccgacccacaataatacatggtttttcaatatagaaaagcaataatggttcatcaaagttcttttgattcattaaatattgttcggtggccaggttacggcgaatatcatttgacttcataacaacgtaatacatcagcataaaacccctttcattttcactactttctcattatactacagattcaaaaaaagggactaacaaaaaggaagttactaaaaaccccggataatggtcatttatccggggtttcttaatcatctacatattctaataggtcgcctggctgacagtcaagcgcttggcaaagacgttctaatgtcgaaaagcgaatcgcttttgccttttccgtctttaagtttgaaaggttggcaatggtaatctcaactttttgtgaaagttcagtgacactcatctttcgttgggccagaatgacgtctaaattaacccgaattggcattttaaatcctccttagactgtgaggtcgttttccgtctgcaatgcaatggcgctcttaaataggtcttcaacaatctgcatcagaatggccaaagcaaacggaataaagatgaacgcaatcccaagtaataacaagcccggcgcatcttctagttgcgtaatccgatagaaaaagggaagtgacaataaactagcaaaacttgcgattaagaccgcatttctaatcgatgatacataacgcaatgtttttggcgcaaacacttggtgttgttcaatcgtattgagaatgcgatgcagcgcatataaagcaacccacacacaaatcgtcacactataagcggccagggccaacgtgataatttcaaaaggatagtctaatttagctgccgtcacaatctggacggtaactaaaaagctaaaaaggaagaagactgcgccgattcctaaaagtgctaaacgtaaaagccatttttttaacatatcaaacacctcattgaatgaattaatagcttgattataacattttaatatcgataaacaattaatttttatcgtttttcgataaattaatactttgttaataatcactattagcggtgttgataatcagcgcaccactgatgaggaccattgtcgctgtattgttccaactgccagtatttaagatcgtccgaatagcggtaattgttgtgctgaccggattaatcctaacaactggctgtaaaaaatggggcagcgttttgatgggaataaaggcgttcgataagaacgttaacacgaggataataatcatcgataagctgctgatcagctctgcatttttgaccattaaccccactaaggcaaaaatccaagaagttgaccagccgataaagaccgccagtagtaatgccccgatcagtgcccccagattgacggtggggcgccaacccattatcaccgctgtaagaatcgccattccgccagaaagcactaatcgcaaaatatcacctactaattgccctgccagtggtgctattggggaaatcggtaatgttttaaaacggtcgaagataccgttattaatatcttctcgtaattgttggccagaaccagaagctgcatttaaaatactttgaactaaaataccagaaaccagcatcggcaagtaggcgtgaacgctaccggcgatgacgccgccgaatagatagccaaacaatagggtaaagataatcggttggatgagcacatcactgacgttatcgggattgtggcgcgtttttaataagttacggtgggttaaagtgagaatatcacgtatagtatgacgttttattatatttgtattcattatctgagctccttagtttttaccaaccgtcatttttaggaaaacatcatctaacgaaggtgtctcaagttttaaatgactaactgtaattttagcaatttgtaattgatttaatattacgattatcactggaagagcgtcgccaccaagtgggctgactaatgtctgttcactaacgctgattggttgctttaaaacgtcctggacaatcgcgtgtgcttgggataattgtgctagctcagtgacggttaaagaaagttgtaagccacctaatttttgctttaattcattaggtgtaccactggcgataagttgaccgtgatcaatgagcgcgatgtgatcggcaaattggtctgcttcctctaaatattgggtggttaaaaagacagtcgatccttgggccaccaatgcttgaattgcttgccacatttgaattcttgttctaggatctaaaccggtagtcggttcatccaaaaataaaatcttcggacgacccactaaactgactgctaagtctaaacggcgtcgcatgccaccggaaaaagtggccaacgcttgattagccgattgcgttaaatcaaaagccgtcagtaactcgtctgcacgaatccggctggcttgactgctaagtccgtttaaccgtccaaataaacggagattatcacgtgcacttaagtcttgatcaatcgctgccgtttgattcgtcacgctaaattgttggcgtgcttggcgactttggcttagtgtattaaagccattcagcgtaatctgcccctcatcagggcgtaataaagtcgtcatcatttttaaaagggtcgttttgccagcgccatttgggcctaagaggccaaatatttcgcctttttttacattgaaagaaatatcttgaacgactttcttttgaccaaattttttttgaacatttctgacttcaatgacattatcctcacgcatattagcgcctcctcatatttaatcaggtcacctgattaaacaatatagtaagtcccccttaccaaaatgtcaaggattgctattttcaaattttagaatggtgtatactggatgaaagacaaaggggaagatgacacatgacaaacagcgtcaaagcagaattagttgctggtaaattagccgaatatgaacaactcagtaaaatctatgatgatatcgtcaaacaagcgcgaccccatctgattgtcgaaggtcaagggaaaatcttattggcactagctgatgaggatcacttatcccaacgagaactcgcctcacgtttaggcatgtcgccacaatctaccagtgaatttgttgcgaaacttgttaaacgtgaattggtcactttgaccaagttaccgagtgatcggcgggttaatttagtaaatctgaccgctgctggtcgccaggaaatcgaatccgctagtcgagaagtgccaccttttgtgaacgcactttctgaagcagaactagatcaactcgtaccgttactgacaaaaatcacaacagcgatgtacgctgatatcgacgcgtctaatcccacattgggcgttaaattccataagttattggctagtcggtacttaaatcaatttaaaaaataaatggcaatcaaaaaagcgagtctcactaatttcttagtgaagctcgcttttttagttagatttattgttaatcgaagtcataatcgctgtcgttcatggcttcaacattgcccaagcggtaaccattcccaacttgtgagaagaaatcatggttcgctgttgatgttgacatcccgtttaagacaactgggttcacatcttcggctgtatctgggaagagagcgccttgtcctaagttcattagggccttattggcgttataacggaggtaagttaagacttcttccgtccagccagtgccatcataaacttcgtgagtgtacttttcttcattggcataaagatcgtaaagtaaatcatacatccagttttgaagttcttcttgttcagcttttgctaattcgttaaagccgagttggaatttataaccgatgtaagtgccatgaacagattcatcacggataattaatttaatgatttcagcaacgttagccaatttgttgttccctaagtaataaagaggagtgtagaaaccagaatagaagaggaatgtttctaagaaaacactggcaattttttgttggagtggtgagccattttgatagatactattaatcttattggctttgtattgcaggtattcgttagtatttgtccagtcaaaaatttcatcaatttcattaggcgtatttaacgttgaaaagattgatgaataactcttagcatgcactgattccataaattggatgttattcaaaacagcttcttcatgcggtgttctgatattggcttttaagctcgccataccatcttgtgattgcaacgtatcaagtaacgttaagccgccaaaaacatgacccacaatccatttttcattgtctggtaaactccgccagtcatctaaatcatttgaaagggggatgcgtgtatctaaccaaaattgttcggttagcttttcccaagtcgctttatcgatttgatcttcaacttgattccaattaattgcatgataattttctgtcatcgtctatgaactcctttgaggtatgtagaccagctgaggaacggctggggtttaattggtagcttcttccggttagctacgtctgtcaaatgaccaacaagttggtcattcaccagactaggctatactcagaagttaagcgctacaaacgcactctagattacgcagctttcacatgcgtttgcgccgacttcgttttcgtcgtccgtatatgtgcggatgtagtagattgatttaatgcctttatgatgcgcgtagtttctgagaatgttaagatcacgggtcgtcatcttatctgtgcgaccgtctttccagtcatataagccagccggaattgttgaacgcatgaagagcgtcatactcatcccttgatcaacgtgtttttgtgcagcagcgtagatgtcgattactttacgcatatcgatgtcataggctgattcataaaaaggcatcgtttcatttgataggcctggtgctggatagtaaattgtcccaattttcttttcttggcgatcttcaacgcgattaacgattggttggagactagctgaagtatcgttaatatatgaaattgagccattaggcgcaacagcgagtctgttttggtgatataacccatcttgcataatcgcttctttcaaagcggcccagtctgcttgagtcgggataaagacaccgtcgaatagtcctttgactttagccgtcttaggcgcccattcagtattcaggtattgatcaaagtaactaccatcagcatacttactgttttcaaagttgtcaaaagtaatcccacgttctttagcaatcttgtttgaggcaactaatgtccagtaattcaataacataaagtaattgcttgtaaagtcgattgattcttctgaaccgtacatcatttggttcttagcgaagtaggtatgcaagcccatgccgcctaagccgattgtgtgggctaattggttaccatgtgctacagaagggacaacatcgatatcagaatgatcagtcacataagttaatgaacggaccatcgtttcaattgaatggccaaaatcaggagaggtcatcatgttcggaatattagttgaacctaagttacagctaatatcagttcctaaaacgtcatattcttgacgattgttaatttgagaaggggtttgcacctgcaagacttcagaacaaaggttactcatgataattttaccgtcaattgggttggctttattagccgtatcgatattcacaatataagggtaacctgattcttgttggagcttgctaatttcattttctaaatcacgggctttaattttcgtcttcttaatcgcgtcgttagccactaagttgtcatattcggccgtaatatcgatgtatgagaaaggttgtccgtattcacgttcaacactatatgggctgaagagatacatatcagcgtcttctttgactaattcatagtacttatctggcactgttaagccgagtgagagggtctttaaccgatatttttcgtcagcattttcttttttagcgcccaagaaagccacgacgtctggatggaaaacgttcagataaacaacaccagcgccttgacgttgccctaattggttggaataagagaatgaatcctctaataatttcataacaggtaagacaccacttgcagcaccgtcgatgcctttgattggatcaccagcaccacgcaagttagacaagctaatcccgacgccaccaccaattcgtgataattgaagggcagagttgatggtccggccaattgaattcatatcgtcggttgtttgtaataagaaacatgatactaattcaccacgacgagaacgccccgcatttaagaaggtaggcgtagctggttggtaacgttgatggatcatttcatcagcaacactcattgcaagggcttcgtcaccatccgcaaaatagagcgcgttggtgaagacccggtctttaaagtcttctaagtaaaagccgttatcatttgttttaagagcgtattgcgcataaaacttataagctgccatgaaagatttaaaatgaaagtcttgatcgattaaatattgatttaagcgttccataaaatcgattgagtaggcctttagaaaatccgcttcgtaatagttttcagccaccatgtaatctaagcgatcttgtagtgatttaaaagtcaccatgttgggttgcacattttgttctaaaaaggcttctagtgcttcttgatccttttgaagggggatttgaccgttaaccggaatattgattttgttattcaattcataataagttacgttttcagttttaatctcttttaaagacattagcgcaccactttcttaaaaaattaataaaatgcccgattttgggtgtaaaaaaagtgaagaccaactcttcaaggagttggtcccactcgtagatgcctattttaaggacagcacttaaacttaaaaggccaatttttgtaattcggctggtctaaaaccggagaaactttcaacaccgtcagcttcaagcacaggaacagcttggaaccctttttcttttaagtaatcaatatattggggttcatcgttaatattatgttcgctaaaagtgatgttgtgtgtttctaaaaaatgctttgtcatacggcattggggacagccgttcttcgtatatagtgtaatgttagccattgtgattaactccttgtggaacttaattagtaattttagtataccgtttaaaaaagaatcatgcaatgtttaaataccagatatggtagtcaaaagtaaaacagccactaattatagtggctgttcgcgaatgattctaaattcgacttgtgtagtgttcctattttaaagttaccattatccaggataatgtcaatccccaattcgattgtaaacaatttgaaaccgacaccgtttcagccgtagcaacgttcctaaaaaatattaaaatttctgacccacccttgaaaaatcggaggacatttttttaccgaacgatttataaaattggcgataggagtcgtgaaaatttttgtttgaagcgtaaccacgcagattgttgagcaatcatctcatctgttaataataccgcgtttttgatatcttctaaataaatctgctcgagttgccgtgctaatttcggatcataaataaaagcattggcttcaaaattcaatttgaaactacgaatatccatattagccgaaccaatcgtactaatatgaccgtccatgacaactgttttggcgtgtaagaaaccatcttgataagcgtaaatcttaacgccagcttcatgtaataactgactataatactgtgtggcccgataaataaaaggatgatccggcatgctaggggtcatgatccgcacatcaacaccagacattgctgctgtcgtgagggcatcgataatactatcatcgggcaccaaataaggggtctggatccataattttttcttagctgaactgatcatcttcaaataacccaacttgatttgttcgtctaatttatccggcccgctcgaaacaatttgcatcgctgccgtgccacgattggcttccgctgcaatcgggaagtggctttcagaataagttaaacgaattgcttcttcaacactggcattccaatccatcaaaaagcgtacttgaagcgccaaaaccgcattaccggtaatgcgcatgtgtgtatcacgccaattaccgaacttagcactacgacctagatattgatcgccaacattaaacccgccgatatacccaattgtgccatctaagacgacgattttacggtgatctctaaaattcaaacgaaaatccgtgattgaatgtttcgaactaaagaaggtccgggcatgtccgccggcttcttcaagtggccgccaccatttttgggtggccccttgagaaccccaagcatcgtataagacgtttactgcgacaccttctttagctttttgaactaatagtgcttgtagttcattaccgatttgatcattgtaaatcgtgtagtactcaatatgaatactcttagtcgcttttttaatatcggcgaacaaggcagcgaatttttcggtcccgtcagtatataacgtcacgtgattatcctttaaaaccggtgcgttattgatatttaagaaaagattgaccatttcagtcgcttcactggataacacctttttaggtaataattcattacgccgattttcttgacgttgaatatcaactaaggccaaaaccccatcgttgatttgtgactgactttggaaaatcttttttcgggataacccacgccctgtaaaaaggtacaaaataaagccgacgacaggcagtaagattaaaactagtagccacgcccaagtcgccgcaatatcgcgcggttgtcgtaagacggtaatgaccgcaaaaaggccattaattaaaataattgcggaaataatctccgttagtagtatcatatgcaaccaatccttccagaaactaattaagtgtatttataaacagtctactaaaacgcattccgaaacaccatgtttttaataactattttttaagccttgttgtgcgaggtggtgtgcccctttattttgccgatcaggtaaccactgatgtagtacgagggaatagggctgttctaaggcgataatctgatcaacatattgctgataatgtttcgcatattgtttttcgaggctttgacagacaattttactatcaacattaatttgaagcatcggctcggtcaaaccaagcgtagtaattttttctaagcccaattgaaccgccataaactcggcaacatgattatccaccggcggtaagggaatgctaaattgatattgctgcttagcggtcacaatcagtatcccagcagcactgggaccaggattgccaagcgtggctgcatctgtataaagtttaatcattcgtaaagtttccacctttccactgacagagacccccggttaatggtaatatggactgcataaggagtgtttctattgcaaactaacaaacgcctattttaccagccaaactacgcctattgcgttacaatttggtcttggattggatttatttatacgctagctttaattctgcaacttgaactcattaatcttaattggcaatcgattacggtggggatcatcgcggttattttaaccattattaatctattcggtcatcgtctcgacatcactgcacagacaataacgcttaaacgaccattatttaaatataaccgaacaattcaattggcacaaacgacagccgtgattgttcaaaaacacggcttattaattaagacaactgagcttgactatcaaccagagcaattattattatcggcgaaagttaaaaaacaactaattaccacattacaagcaaataactggccagttcaaaatgaacagtaaaaaaatagaggactcgcgcaaaacgcaaaatcgttttggcacgggtcctctttttaaatgtcgttaagcttcaattttttggacgttggccgcttgtaaaccgcgggcgccttctttgacctcgaataagacttgatcatctttgtctagtgtcttatagccgtcaatttggattgcggtaaagtggacgaaaatttcctcatcatctcggtaattgatgaagccataacctttagcattgctaaaccatttcacgattcctcgttccatcacaatccctcctctaaagagtggtgcgtcaacacaccattgtcattatgccaattaagttgtagcccttaactggtcacagttatatcttaccactttagtaggaacgtgtcgaagataaaatttatcagattactatctgccaattccgtacgaaatcggctatactaggtactatcataaacaaaaggagctggtcgttatgtcagatattcaaatcgcacaagcaaatgaagctacggaaatgaagcccattacggcaattgccgaacaaatcgggttacaggccaccgatattgaacaatatgggccatataaagcaaaacttaactttcaagccatcaatcggttaaaagaaaaagaagatggcaaactcattttagtcacttcgattaatccgacaccagccggagaaggtaagtcaaccgttactgttggtctaggggatgctttacgccaacttgaccaatcagcagtcattgccttacgcgaaccttcattaggccctgtcatggggatgaaagggggcgcgactggtggtggttacgcccaagttgtgccaatggctgacattaatttacattttacaggcgatatgcacgccttaacggccgctgtaaataccctagcagccttaattgataatcatctacaacaagggaatgttttaaacatcgatcctagacggattatctggaaacgcgcacttgatattaacgatcgtgccttgcgccaagtggtgattggtttaggtggaccagtacaagggatgccaagacaagatggctttgatattaccgttgccagtgaattaatggcgattctttgtttagcaaccgatattaccgatctcaaaaaccggattagcaaaattgtgattggctacaactatgatcgcgaacccgtgactgttggcgacttagaagtcaccggggccatcgccatgttattaaaagacgcactcaagcctaatatggtccaaactttagaacatacaccagcactcgtacatggtggcccatttgccaatattgcccatggctgtaatagtatcttagcgactcaaacagccttgaaattaggcgatattgccattactgaagctggctttggggctgatttaggcgctgaaaaattcctcgatattaaggtaccgcaattagggaaaacaccagataccatcgtgattgtggcgactatccgtgctttgaagtataacggtggggtggccttggccgatttaaccactgaaaacttagacgccttgaaagctggtttcagtaatctagccaaacatattgcgaatatgcaacgctacggcgtccccgttgtcgtgtcagttaatgaatttacaagcgatacggctgccgaagtccaattgctacaagatctttgtcaagcaatgaatgtcactgcggtcccaactagtgtctgggccaatggttttcaaggcgggattgaactagccaaagcagtcttagaagccttacaacaacctaaggccttcaaaccattatatgatccacaagctgacatcaaatctaagttaacaaccgttgtaaccgaaatttacggtggccgcgacgtcgtgttcgaaggcaaagcgatcaatcaactaaaacaaattgaaaaaaatggttgggctcacttaccggtctgcatcgccaaaacacaatattcattatcagatgatcctaaagcactcggtgcgccaagcgactttacaatccacgtccgtgaattgattccaaagctcggggccggttttatcgtcgcaatgactggcgccgtcttaacgatgcccggattacctaagaaaccagccgcactcaatatggatgttactgcagacggccaaattagtggcttattctaacgagactgcgcctaaattgtacaatcctgcaccccaccacgaaaactgattgacaagcgtgctctttttaaggacaatgttaatcagtatgaataggaggcaaccatgctactttatattattttaggcctattaatcttagtgggtgatcaactcttaaaagggtggattgtcgccaatgttagctatggcgcgttgcacactgtgattcccaacattctcggccttacttacgtccaaaatgacggcgctgcttggagtatgttggctggtcagcaatggttcttctatattgttaccatcatcgcagtaggtgttattggctatttattttatacctctgaacgatctgaaaaactatatcgcatcggcttgacgttaatgttagccggcgcgttagggaatttcatagatcgtttacatttaaaatacgtggtcgatatgttccaattagaatttattaattttcccatctttaatgttgcagatactgccctcacttgtggtgtcatctgcgtctttattgccatcttgttgaaagagaaagtgactcatgactgaaaaaaaagaatttacaattacaaccgaaactggccggattgacaaggtattaagccaattattacctgattattcgcgttcccaaatccaacaatggttaaaaaaggacctcgttgaaatcaacgggcaaacttctaaaggtaaccataaagtggtcgctgacgaaaagattagcgtcacgattccggatcccgtctcactcgatttagtaccagaagatattcctttagacattgtctatgaagatgaccaagtccttgtggtcaataagccacaagggatggttgttcatccttcaccaggccatcctaatggcactttggtgaatgctttattagcacatacaccactttctgaaatcaacggtgttttccgcccaggaatcgtgcatcgaattgataaggatacttccggtttattgatggtcgctaagactaacgaagcccacgaatcattatcagaacaattaaaggctaagtctaatctccgtgaatacctcgcattagtgcatggtaatatcgaagaagacgaaggcacaatcgatgcaccaattggccgttcaaaactggatcggatgaaacaagcaattgtcccagacggtcgcccagcggtcactcattttgaagttgtcgaacgctttacggattatactttaattcgttgtcgcttagaaacaggccggacacatcaaatccgtgtgcatcttgcttatattaaccgtccagtagccggtgacccaacttatggtcctcggaagacattgcctggtaaagggcaattcttacatgctgctgttttaggctttaagcacccaacaaccggtgaaaacatgcgttttgaagcgccattaccagccatttttgaaaaaacgttgcaggaattacgcgaaaacaattgacaaaccgcgatttatcaactatgattatcacaacttaatagaaacctttaatttcagtcccgtgaggctgagaaggcacggtgaattaatccattagattaggactctaggactagtctcaaactgtaacctctcaaccaatatcggttgagaggttttttgttggaaggagtgtcatgaacatggtgaaagaagtcgtagatagcacaacaatgaaacgtgtttttacacggattacttacgagattatcgaacaaaacaaggggatttcagaccttgtctttgtcggcatcaaaacacggggcgtttttatcgctgaacgcatcgctaaacgtttagaacaactcgaaggcgttacggtaccagtggggacacttgatattacactctaccgtgatgatcaacatgatttaaatagtcataatgaaccccaactaaatggcaatgacatccctgtcgatattacggacaaacacgttatcctcatcgatgatgtcttatacactggccggacaattcgggccgcacttgatgccttaatggatcttggtcgccctaaaaaaatctcactcgctgttttagtcgatcgtggtcaccgcgaactaccaattcgacctgatttcgttggtaaaaacattccaactgctcttaacgaacaaatcaaagtcgctatgcaagaaattgatgatcatgatggcattaccattgaaaaattgaattaaagctagaaccgtttaattgtctccagagagagcaaaagggtttgcccgcataattggcgaagactgactagcatcagttcgcccactatgcgtccaaaggacatacccgcagagtagggatgtcctttttttatcgccattatcgcttaatgattaattatcggaggtcttcatatgacaaaatcaacttatcgcaatcccgatgcggtgttagacgtaaacgagcgtccaacaaccgggaaatggattggcttatccatccagcacatgttcgccatgtttgggtcaaccgtcttagtgcccatcttggtcggcttaaaccccggtatcgcactctttagttccggggtcggcaccctgatgtacttattaattactaaaggaaagattccagcttacatgggctcgagtttctcattcatcgtcccaatgctcgctttaatgaaaacaactggttatcccgggattgcgcaggggacaatggccgtcggtgcggtttacctcatcgtttctgtcttagtaagtttaattggctccggctggatcgacaaagccttgccaccgattgttgtcggcccgattgtcatggtcatcggcctctcattagccggtacagccgctaaacaagcgacaatcaatgccgctggtaactatgacttgaaattcttcgcagtcgctatcttaaccttactaatcacaatcgcctttaacatgtatctcaaaggcttcatgagtttgattccggtcttactcgggattgtctcaggttacatcatcgccgtcttgttcggcatcgttgatttccaaccggtcttaaacgctccttggttcaaggtcccggatttccaagtcccatttgtcacctataagcctggtctttactggggcgcaatcctcagtatggcaccgattgcgtttgttacaatgacggaacacatgggccacatcatggtcttaaataaattaacgaaacgcaacttcttcaaaaatcctggtcttcaccggactttagcaggggacgggacagcttcaatcatcgctgcttttgttgggggacctcctgtcaccagttatggtgaaaacatcggtgtcttggccattactaaagttcacagtgtttgggtattaggcggcgccgcattttttgccatcatcttcggtttcatcggtaaactaagcgcacttatccaaagcatcccggcacctgttatcggcgggattagcttcttactcttcggcgttatcgcctcaagtgggctccgggtcttaatcgacaaccaagtcgatttcgataaaaaacggaacttaatgattggctcatcaatcttagtgattgggattgggaatgcctacttacaacttggtcaatatcaattctcaggcttagcgattgcaacagtcttaggcatcgcaatgaacctgatcttaccacaaaaatcaaagagtgaaatcgaattggaggcacaacaaaatgactaatcaaacggcgattgtatctgttgaacaactaacaaattcatctgttttaaatttaattgaacgggcagaagcctttaaacaaggtgcgacttgcgaattaacgcgtcccgtatacgcgatgaacctcttttttgaaaatagcactcgaaccaaaacgagttttgaaatggccgaacgcaagctcggattatcagtaatgtcttttgaagccgaaaccagttcagtttcaaaaggagagacactcagcgatacacttaagacggtccaagcaattggcgtcgattttgtcgctgttcgtcatccgcaaaacaactactacgacgagttactcgccgatccagccttccacttagccttggctaacggcggggacggcagcggtcaacatccatcacaatgtttacttgatatgatgaccattcacgaagagttcggacactttgacggtttgaaagtggtcatctgcggtgatttacgtcactcacgagttgctaaatctaacatgcaacttttgaaacgactgggcgcacaactctacttcgccggtcctgaagaatggtttacggctgaattcaacgattacggccaacacgtcgccctcgatagcatcttagatcaagtcgatgtggtcatgttactcagaatccaacacgaacgctttgattcagccgaaacaatgaccgacgaagccttccacgttaaatacggtctaacagcacaaagggccgcccaattaaaagcaagtactatctggttacacccagcaccagttaatcgtgacgttgaaatcgccgatgaattagtcgaagcaccccaatcacgaatttttaagcagatgcataacggggtcttcatgcgcatggcaatgattgaatacttattaaaacaaaaaaatctcattaaagattaggggtctgcagtatgtatcgacttatccaaaatggtcaactattaattgacgatcaactcgtcaaaagagacatcgcgattgatgaaaaaggacggatcactgcgattgaagcgcaaattacaccaactgacgagccaaccgaaaccatttttgatgcacaaggggcgctcgtgagtgccgggttaattgatggacatgttcatttcagagatccaggtttcaccgataaagaaaccctccaaacaggcagccgggctgcggctcacggggggtatacgagtgtcattgcaatgccgaacctcaacccagtacctgacaatctacccgatttcaaaatattagttgcccgtaaccaaacggaaacgagcgtccatacgtatcaatttgcaccaatcaccggcgatttagtcaataacgacctagttgatatgccggctttcaaagcagcaggcgccgccggttttaccaatgacggtcacggtgtgcaagatgctcaaacaatgtacctcgccatgcaacaagcagcagcaattgatgcgccaatcgtcgcgcacgttgaagacatctcattagtcaacggaggtgtcattcacgacggtgccgcggctaaacggttaaacgttcctggcattcctagcgtgagcgaatccgcccaagtcgcacgcgacatcgaactcgctcgtgcaaccggcgttcactaccatatctgccacatttcaactaaagaaacagtggcgcttgtccgccgtgctaaagcagatggtgttaatatcacctgcgaagtcacaccacatcatcttttactcgacgatcgttcaatcattagtgacgatgccatgttaaaaatgaatccccccctcagaacgttagcagatcgtcaaagcctctgggcaggtctgatggacggtacaatcgacgtgattgcgactgatcacgcaccacataccgcggctgagaaaagtcagtcgttattacaagcaccatttggtatagtagggagtgaaacagccttcagtttactctatacacacctggtcgttaatgggccctttagcttagcccaattattagctaaaatgacgaccgttccggcacaggttttcaatctaccagcagccggtcaactacgcgttggcgaccaagccgatatcgctgtttttaacctgacacaacccactactattcaagcaaccgactttcaatctaagggtcacaacacgccattcatcggtgaaacggtacttggcggtacagaattgaccctagttgccggtcaagttgcttatcaaaggagtaaatagcttatgaaacgttatctcatcttagaagacggcaccgtctttagcggttttggcttcggtgcacctacaatctcaaccggtgaaattgtctttaataccggtatgagtggttatcaagaaaccattacggatcaatcctacaacggccaaattattgcttttacatacccattaatcggcaattacggtgttaaccgcgatgattttgaatcaatcaaacctacttgtaaaggggtggtcgttcatgaagtcccacgcttagctaataactggcggatgaacatgagccttgacgacttcttaaaacaaaagaaaattcccggtatttggggcattgatacccgcgccttaacgcgtcgcttacgggataaaggtactatgaaggccagcatcgtggatgccgctgacgatcatgcctttgatcaattaaaagccttggtattacctaaaaatcaagttcaacaagtatcaacggctaaaccatatcctagtcctgcgaccggtcgcaatatcgtggttatcgactttggattgaagcacagtattttacgcgaattatcaaaacgcaactgtaatttaactgtcctaccttataatgccaccgctgaagagattctcagcctcgatccagacggcgtcatgttaaccaatggccctggggatccagaagatgttccagaagcaatcgaaatgattcggggcattcaagggaagctaccaatcttcgggatttgtcttggccaccaattattcgcactcgctaacggcgctaaaacatacaaaatgaagtttggtcaccgcggctttaaccatcccgttcgcgaaattgccactaaccggattgatttcacgtcacaaaatcacggtttcgccgttgacgcagactcaatcgacccacaacaactattagtgactcacgttgaaattaacgaccacactgtcgaaggactccgtcatcgtcagtacccagcattttccgttcagttccatccagacgcagcacctggtccacacgatgctgtccacctatttgatgaattcatcgacatgattgatgattttaatcgccgccaaaaatagaaaaaggggatttagtgatgccaaaaagaaccgatattcgtaaaattttagtcattggctccggtccaatcgtgattggtcaagctgccgaatttgattactcaggaacccaagcctgtcttgcacttaaagaagaagggtaccaagtggtgctcatcaactcaaaccctgcgacgattatgactgataaaacagttgctgacacggtttatatcgaaccaatcacacttgattttgtgacacaaattttaagaaaagaactaccagatgcgatcttaccaacacttgggggtcaaacaggcttaaacatggccttagaactcgctaattgtgggattcttgctgaactcgatatcgaattactcgggacaaaattaagtgccatcgatcaagctgaagatcgggagttattcaagaacttgatgaaccaactcaatgaacccatccctgaatcagccattgcgcactcattagatgatgcacaagaatttgtaaagcaaaacggcttccccgtaattattcgccctgccttcacacttggtgggacaggcggtgggattgccgaaaatgcaggccaactcaaaacaatcgtcaaaaacgggattgcattatccccagttggtcaagtccttgttgaacaaagtattgcgggttacaaagaaatcgaatttgaagtgatgcgtgatcgcaacgacaacgccttagtcgtctgcaatatggaaaacttcgatccagtcggcatccataccggtgattcaatcgtctttgccccagttcaaacattaagtgaccgcgaagtgcaaatgcttcgggacgcttcattaaaaattatccgggccttgaagattgaagggggctgtaacgttcaattagcccttgatcctaacagcgagcgctacttcattatcgaagttaatcctcgggtgagtcgctcatcagccttagcctcaaaagcaacaggttatccgattgctaagatggccgctaaaattgcggttggtctaacactcgacgaaatctataacccaattaccgggactacttacgcgcaattcgaaccgatgttggattacgttgttgccaagattccccgctggccttttgataagttcaataagggtgaccgccaattaggcactcaaatgaaagcgactggcgaagttatggcgattggccggaacatcgaagaatcactcctaaaagccgttcgctcacttgaaatcggcacagcccaccttgaattagacggtttaaccagcgtcagcgacaacgatctggtccaacggattattcatccgcaagatgaccgccttttctacctcgcagaagcattacgtcgcgggtatctcattcaggaattagctgaattaacgaagatcgatttattcttcttagataaaatcagtcacatcgttgaactagaagaacaactccgtagtcaaaaaggcgacgtcgaattactcgaaattgttaagaaaaacggcttttcagacgaaaagattgccaaaacatggcaaatcacgccaatccaagtgcgccaaatgcgccaagaaagtggtattcaacccgtctataagatggtcgatacttgtgccgccgagtttgaatcacaaaccccttattactacgcaacctacgaacaagaaaatgaaagtttagtttcagctaaaccatcaatcttagttatcggttccggccccattcgaatcggtcaaggggttgaattcgattacgcaaccgtccactgtgtacaagccattcaaaaggccggttacgaagcaatcatcatgaatagtaatccagagacggtttcaactgatttttcaatctccgacaagctttactttgaaccattaacactcgaagatgttttaaacgtcgtcgaactagaaaaaccagaaggcgttatcgttcaattcggggggcaaacagcgattaacttggccgcaccacttgaagaaaacggcgttaagatcttagggacgagcgttgccaacttagaccgcgctgaagaccgtgatttattcgaccaattgattcaagaattgaatattccccaaccagtcggtaaaacagcaaccaacgcacctgatgcgttaacgatcgcaacagagattggttatcccgtcttaattcggcctagtttcgtcttaggtggccgggcaatggaaattgtgcatacgccagaagacttaactcactatatgcaagaagccgttaaggtctcagacgaacacccagtcttaatcgatcgttacttaatggggaaagaatgtgaagtcgatgctatctgtgacggtcaagaggtcttaattccaggtatcatggaacatatcgaacgggccggtgtccattcaggcgattcaatggccgtttatccaccacaaaacctcacagaagatcaaaaagcagcaattatcgactacaccactaaactttgtcttgcactcgattgtcatggtttgttgaacatccaattcatcattcaaaatgacgaagtttacgtcatcgaagtcaatccgcgtgctagccggacagtgccattcttaagtaaagttactcaaattccaatggcacaactcgcaacccaattaattttaggcagcaccttagctgaattgaagagtccaacagggttgttaccagcaggcccactcatccacgtgaaagcaccagtcttctcattctcaaaactaacccgtgttgatagtctcttagggcctgaaatgaaatcaaccggtgaagtgatggggacagatgtcacgatgcaaaaagcactttataaagcctttgaagctagtggcatgcatctgccaagtcacggcaacgtcttaatgacagtcacgaaccaagataaggcccaagcacttgctttggcgaaacgctttagagaagttggttaccaaatcatcgcgaccccgggaacaacacaacaatttaaagcggcgggcattccagttcaacaagttgacaagatcaacgccacttcaggcgacttactcgacaagattaaagccggccatatccaactggtcatcaatacaactggtttaaacgaagccccccaagtggctaaagatagtattgtcattcgccaaaccgctattgaacacggcattccattattaacatctctcgatacaacggatgccatcttaacggtcctagaatcacaatcactcctcacaaaaccactctaaaagaagtgcgttcaaactaattatattctgagcattattaaagcgccaaggaccgccttggtctcttggcgcttttattacataaaattcaaaggagtcacgcttatgttgccactagaatggctgttaacgattcaagaccaaactgaaattgcgcctggtattttcgaactccgtttatcaggtgacttagcccaagaaaaggtgcaacccggacaattcgtcgatgttaaaattcctagcgatgcgctcctgttgagacgcccatttgggattgccaatgtcgatgccgcacataacaccattaccttactttatcggacggttggcgaagggacccaaattctcagtgagtgttcacagggaactgaattatccgtcttaggcccattaggcggacacggctatccaattgatcaacttaagcctcagcaaaaagctttaatcatcggtgggggaaccggcattccaccgttacacgaattatccagacaattagtcgctaaaggcgttcaagtccaacacgtttttggctttgctaatcaagaggccatcttttatcaagcggagtttgaaaaactagggccaaccgcctatgcaactaatgatggctcttacggttacaaaggtcacgtcggcttattactcgacgcgcaatttgcagatgccgccacaacctacgacgcaatctatgcctgtgggcctaaaggcttgttaatggctgtcgataatcgcttcagtgcacatccaaacgcttatatctcattagaagaacggatggcctgcggaattggtgcttgttacgcctgcgtcacgaaactaaaagtcgacccaacaatccagctaaaaatctgcgatgacggaccagtctttaaaacaaacgaggtgttaatctaatgactagcgatttacacgtgtctttacccggcttagaactgaagaaccccattatgccagcatcaggctgttttggctttggccaagagtacggccggtattacgatcttaatttactcggcgcaattatcattaaagccgcgacaaaagaaccccgcttagggaatgccacgccaagagttgccgagacacccagtgggatgttaaacgcaatcggtttgcaaaacccagggattgaagccattatgactgaaaagctaccttggttggcagaacgttacccagacctaccaattatcgccaacgttgcgggaaataccgaagcagactatgtcgctgtctgtgaacgaattagccaagcaccgaacgttcatgcgattgaattaaacatctcttgccccaatgtcgcacacggcggcttagagttcggaacttcaccagaggccgccgcgactttaacgaaagcctgtgttgcagttagccaggtccccgtctacgtcaaactctcaccaaacgtcaccgacattcgaccgatagctaaggcagtcgaagcagcgggggcagctggcttctcactaatcaataccttagttgggatgcgtattgatccaaagacccggcaaccaatcctcgctaatcaaactggaggcctctcaggcccagccatcaagccagtcgcaatccgcctagttcatcaagtgcgttcgatttccaacctcccgattattgggatgggcggaatcgcaacagcgggggatgcactcgaactgatggcagctggtgctaacgcgattgctgttggcacggctaatttcagtgaaccatttgcttgtcccaatatcatcaaggcgctccctgatgaacttgctaagtacgatttacatgactttaaaacattcgccgttaaccaggaggttctataattaatgacaaatcccgtaattatcgcgctagactttcccaattggcaaaaaacagaccaatttctacaacaatttcccaaagacgaagcactattcgtaaaaatcggcatggaacttttttatcaagaagggccgcagctcattaaaacgctcaaagcacgcggctatcggatcttcctcgatttaaagctttacgatattccaaatacagttcaaagtgcaatgacggttatcggtcaattaggcgtcgattacacgacgatacacgcagctggtgggcaaacaatgctgcaagccggtgccgctggcttaaaagcgggcgctaaacaagccaacgtcaaacccgccaagttattagccatcacgcaattaacgtcaaccaatgaggctcaaatgcaacaggaacaactcgtttctgtcagcctgcctgaatcggtggcacattacgcacaactcgcgcaacaatccgactgtgacggggtaatctgttctgcacaagagattaccaccatcaaaagtaagaccgctacagattttctctgcgttacaccaggtattcgtcccgcaacgagccaaaataacgaccaaaaacgggcagtcacaccacttgcggccgctcagatgcatagtaacggcatcgttgttgggcgcccaattacgcaagccagtgatccttatcaagcttaccaagctatcaaatcagaatgggagtctttcaaatgacaacaattgccgaacaagtcgcacaagccttaatcgatatcaaagcagtgagcctcagtccaaatcaaccctttacttgggcaagtggcctcaaaagtcccatttactgtgacaaccgcctcacaattggctaccctaaggtccgcaagttaattgccagtcaattagccgctgccatcaaagcccaattcccagaagttgaagtcattggtggcaccgcaaccgctgggattccacatgctgcttggattgcagctgaacttgatctaccgatggtttatattcgctctaaaccaaaggaccacggtcaagggcgtcaaatcgaaggaccctttacagccggtcaaaaaatggtcttaattgatgatttaatttcaactggcggtagcgtactgcaagctgctcaagctgcacaaaaagaaggggctgaaatcctaggcgtctttgggattttctcatacgaattggctgctggtcgcaagaacttcgaacaagccgggttcccactgatgaccctttctaacttttcagcattattagccgttgaacaagctgccgataatctgacaccagaacaagcaacatccttaaatgaatggcgccaagatccacaagcctggtcagacgcacattaaaaaaagagcgtgccaccagtcggatatgctctgaggattaaccctgaataggatgactaatagaacacgtttagaaagtggcggaagtcatatgcctaaaccaacaaaaaagcgttccgtcaaaatttaatttggcggaacgctttttaattaggcttgcactggtttattacgtaacttttgaacgagtgcttcgtccggtgtcgtatagagggtttgttgtccttcgtaaatgacaaaacctggtctggcaccgtttggtttcttaattttcttaacttgaatgtaatcaactggcacagcagctgataagcgggccttcgagaagtaggccgctaagttaccggcttcttgaatcgtttgttcagacggtgtcggactatcaataatcacatgggaacccggaatattcttaacatgcaaccagatatcggttttatgtgcttttttcaaggtcaactgatcattttgatagttattcttcccgacaaagattcgcgtgccatctgtcgcatagaaaacttctggttcactaatcttatagcgtttttgtttcttagcgcctgttttcttaatcttaagatagccttcagcctgtaattcggccttgatatcttccaaatccttaggttcagcgatctcaatttgggccataattgtgtagaaatattgtaattcagcttctgtcttagccatttggtcattcacataggcaatcgagtttcttagtttttgatatttcgagaagtacttctgtgcatttttggaaggactaatttgattggataacgtgattttaataggttcattgttatcgtaaaaattagggagcgtcacttcggtcatgccccgttcaacctggcgtaagtaggtggttaaaatttcacctttgatccgataatcatcggcactatcggctgctttaagcgttttttgtagttttttaagtttcttttcatccttttgaatctcattacgaatgaagtgaatgagggccccaccttgttgctgcacacggtcgcgctgagccttatgaagatagtattggtctaacagttcactcagcgtttcaaaatggctctgcgtccctgttaggctctgataagggaaggcggtaaaccatgatttcttttcaccaattgttaacgttggttgtgcttggtcaaattgcttgaagaaatcagtcacgactgctaaatagttatcgtggtccattaaacgggtttgcaattcaagggcgctttcgcggctcatgccttggaattgttgttgtaaccaatgaatttgttcatcggcatcttcattatagtaacttaaccaatcaagagttcctagatcggtcgtaaaggcatttagaccagttggtgctggtggattaacgtagtcggcccccggcattaaaaagcggaaccggttttgtgaaaccccaacatggcgaattaaatccaggattttttgagtttcaaggttaatcaagatgacattactatgccgacccattaattcgataatcaaacatagcttttgcatgtcgcccaattcgttacgggatttaaaggttagacgcaaaattcggtcactttcaacttgttcaatctgttctaaaatagcaccgtctaaatatttacgaagcgtcatcgcaaaatttggtggcgttgcagggttcgcataaggcacccgcgttacttgcactcgtgcataagaagggtgtgcagataacaaaagggggtatgttttacgattagcccggatggttaagattacctcattggcataaggctgttggattttagtaattttaccgtcggcaagcgttgtattgagctcgttgacaacggcgtgagtcattaaaccgtcaaaggtcattattggtcacactttctataatagaattatcttacttattgtaactgttttggcacagaacctcaaagaaattaacgcatctgctaactaactgcaggtgtttaaaatttacataattagctaaaccgttatcatcgccgttataacgataaactaaagggagagggcctatacaactttttgaaaaaagcgattaataggggaattagcccgtcatttatgatatagttattaccgaataataaaaaagtaggtgtcaacatgaaaattgctgtagtcactgatagtactgcttatctcacagaacagcaagtgaaagaccatcatctctacgttgttccgatcccagtaattctcgatggacaagtgtacgatgaaggcgtcgacattacatctgaagagttctatcaaaaattaaaaacagccgaaacatttccaagcacctcacagcctccactaggcgagatgttaaaattatacgaagatctaggcaacgaaggctacgatgccgtcatcagtatccaccttgccagcacgatctccggatttgtgacaactttgaaaaatgcggccagcaccatcgataatatccaagtcgtgccttacgattctgggattaccgtgatgttaatgggctatctagcaatggaagcagccagaatggcgcgcgatccagaagtcactgttgaacaaattacggcccgtcttgatgacttaagaagcacaattgatgaatgcttcatcgtcaacgacttacaaaacttagtccgtggtggccgtctatcaaatgcctctgcctttatcggtagcatgttaaagattaagccattattaacatttgatgacgaaaccaacaagattacagcttttgaaaaggtgcgttcattgaagaaggcctacgcccgcgctgaacaaatcttcgaagaaacacaagaacgtgttgactacccattacgggcattgattatccatgccaacgatgaagcggcagcactatcatggcgtgataaactccgtgaaaaacatcctgatttaccgattgatatcagctattttggcccagttatcggtgcccacttaggtgaaaaggcaattgccctagcttggattaaggatttcacgaaagaataatattaaataatgctttaaaaaaatggtttacagcaattaagtttgctgtaaaccattttttagttatataatcatgtaagcggttagccaatttcgactaattttgtaccaatgagtttataaataacagatttaacagctactttttgcacaatagccaacgacgattcgctgaggtcaaattcattgacgctggcaggcgcattaatattggccatttcatcgttaaaaagggccacaaattggtcataagcttcaccggcactagtattatctagggcttgttgaatgccttttttgcagacgtctagcgggaaaacaagcttcataatgctgacaataatcaattcagctagatgatcgcggttatagcgtttcttaattggccgttcaataatggccatcttaacgtaactgttaatcatcgttttcgtaatcttaacgtgcaagagtggctctagttgcttattgacttcattaatcacttgatccatatataactctagatccggaaaatctccccattgcggcaggcgcagggcttgaaagtcactaagccactgcttaaattcttgagattgcatttcgatactccttaacgaccgacttgtttgttcttttattatgccatagcgttaatcatttgtcacgtacgtagaatgtaattctatttttagttgacttatattctatatcaatctataatactcgacaaatagagaaaaaagaggcgatcatttgcatatgatgactaataaacgacaacaaattatctacgaagtttggaatgccattacacacggtgtgggcttcttcggtagcctagcattggtaatcctcctgattgttaagagtgttcaaaaatcgctatccccagttgcgattgctagtttaatcgtttacggtgccacattactagcgctgtatctcgcatcaacgttattccactgtttagcctttacgaaggccaaacgagtttttcaaatattcgatcatagtaatattttcttgttaatcgctggcacctatacaccatactgtttgatttttatcgggcatacggcgggcattagtctattgattgcgatttggacacttgcaattgcgggcattttaacacatatttttagccacggtcgctaccaacgtctagaaaccagcatttacgttattatgggctggttatgcttattggcaggcaagacgttatacactaacttatcaccctcaggtttttggttgctcgtcagtggtggcgtcgtcttcacagttggcgccttaatctacagttttcctaaaattcctggattacatttgatttggcactttttcgtaatgcttggaacgacattaatgttcttttcaatttatctgaacatctaaattattgactcaaaggagtatcactcacatgacaattaaaatagtaaccgattcatcaattcaattaactacagcagaacaagaacggtatgatatccatattgtgcctttaacgattcaacaaggtgctgaatccttcgttgacggtcaaacaattacccgtgccgaatttttaagccgcttgcaaagtgcaacgactgagtttccaacaacgagccaaccaacagtcggcagtttcgttgaactatacgaccaattgggggctgatggcagtacaatcttatcaatccactgcacagggttactcagcgggactatcgaaggggcgcatacagcggcccaacaatcaacaagtgacgtccacgtcattgatagtaaagaaattgaccgtggcctggcttatcaagttgtcgcagccgctcaagatgttgaagcggggaagacactcactgaaatcattgcccatcttaatgaggttcgtagcaagacagaaacctacgtctttttagactcactagatgcactccaacgcggcggacgtattagccggatggcggggctcttaacaaaactgattaaactcaaggtgattgtccgcttaacagatacggaattagaagtgattgctaagggacgggggctaaagaccttcaccaaagaaatcaataatattcgcgaacacttggccactcaagatgttgctgaaattggcatttcacacgtcggcatcactgacgaactatccgccaaaatccaagcaacgctagaacaaacccaaccccacgtcccttatacagtcgctttaacgagtcccgttattatgagtcacgttggtctgggggccttcggggttttttaccttacgaaatagtatcaccaaagaacgtcttcatgagacgttctttttttgcgtttaaaattgcgtaaaatctagttgcgttattcagagtcatcatctataatagaatgaacgttctaataagaggagattatcagatgcgcacgaaagaatttgaaacaacagccgtcttagacaaagcaatgctcgttttttggcgccagggatatgaacaaacgtcgatgcaaaacctagtcgacgaaatgggcatccatcgtcgtagtatttatgatacgtttggtgataagcaccagctatttatcgcagtcttagcgcattatcacgatcaaatcaccgcgacatttaatcaaatcatcaatgattatagcgaccttagtagtcgtttgacagccatttttgaggcgttcattaaccacccggcacaacaaccagacggctgtttagtcgttaatacggcaaccgcgttatcaacgttagaagaagatatccaacaacttattaaacgctatttacagcaggaacaagcaatgctgcagcgattactgattgaagggcaagctgagttgcagcctcctattaagagcgagctattagccgcaacacttcaaaatgcattggttggcattcgtgtcatggctaaagtaaatccagattcagaggcgctaatcgtaacagcacaccaaacacttcaaatactcccatggaaagaggcactttaaaatgaaagcagctcaaattacaaaatatagtaaagatctcaatgtgaccgtgaaagaaattgccacccctaagccccaagctaacgaagtactcatcaaagttagctatgccgcagtcaatccgttagatttaatgaatattcacggcagtgttaagttgattcaagactattcgatgccattaacccttggcaatgaagtcgttggtgaaattaccgctatcggttctaacgtaacgccttttaaaccgggtgacctagtttacacacgtctaccacttgctaagattggtggttttgcagaatacgttgcggtcgatgccaatgctatctggtatacacctaccaatttatcagctaaagaggccgttgctgtccccttgaccggtttaaccgcttatcaaggcctcacggaagaattagctgttgaagcagggaagacgattttcattcctggtggttctggcagttttggtcaattagccgtgccagtcgctaaatctttaggcttaacagtcattgtctcagggaacgctgcagcacgtgagcatattctagaattaggtgctgaccaataccttgattaccggacaaccgattattggcaggtattaaacgatgtcgattacgttatcgatactcgtggggctcaagatatcgaacgtgaactttcaattatgaaacccggtggccgtttattaagtttggtggcaggtcctaataagcattttgctatcacgcaccaattacctgcctggaaacgacttttatttggtttagtcggtaagaagtgggataaactcgctagtaaagctcaagttaactaccgcttcatctttgtgcgttcggatggccaacaacttaaaaaagtcactgaattagttgaaaaacatcacattacaccagctatcgatccacacgattttgatcttgatcacgttcaagatgcactggaattagttgctaatggtaaattagccggtaaagttgtaattcgactaactgactaaagtaaatctaaaaagcccagatattggtatttaaccagtatctgggctttttttaaatggcctgtgctaaattctaaagtactgtttggtgccatttttagctagttcaaataaccaagcagttcaattaaatttaatctagttttcaacataaaaataatcgattacggtgattaaagacggtgtgggggacctattaaataaaaaaaatattctagtttacataatatatattataggaagtatgtatttattttaaaagagtggctgattttgacttattaatctgtatttaagtccttaatttagcaaattcttttagcaacgttttaaaatgctttaactaaaacatcaaccgtttaaaaaactcaactacgattaacaaatctcaatgctaaattactgatctgatcgcaaattaaaaccactgcctaatcattaataatcaataaccacatgaaattcgttaaataacttaggattgatttatgcagctgtaaaatccataattttgaggctcaaattgataatcattaaccataatccgagtttaataaaacgctaatttgatgctcaaatcggcctaatcatgctataaacactgttatatcaacgtttcattaagatgaaagaccgttaaacaggcattttattcgtttttaaatggctgctgcagatggtctgaaaacagatttctagggttagtggtcaaaatttgccaaacaagtgttgttaaaattatggttttaacaacacttgtagtattctcgccgcttttttgttaaaataactataattctctattaaggtggtttcaatcatggaccaacaacgttatctcgaactatgtgaacaacgcttggcggatcttcccgattacgtccgtaaattttatattaatcggcaagccaatgcatactcctctgcaacgctctatcaatatctccaagaatacgtccgcttcttctcctggttaattgacgaacaaatcgttactgttcaaacgactaaggatatccctcttgttgcgcttgataagatgaaattagaagatatcgaactctataagatctttttaatgaataaacgaaaagcaaataatcacaagctctcctttcaggctgttaatcgctctatcaacgctttgaatgcgctctggtacttcctgacgattgaagccgaacaagccgatggtgagccttatttctaccgcaacgtcatgaaaaaagtcaaactgctcaaatcatccgagacaatggccactcgttcccgccatatcggtcaaaagttgctcaccggtgataaaaaacacgacttcattgcctttatgcaagtcgactatcccagtgcgctatctaatcgccaactcgcttcttatacgcagaattgtgaacgggatattgcgatttgcgtattggcactcactaccggcattcgtctttccgaactcgcccaagctaacgtttctgatttaaaccttgaacaactaacaattacggttattcgcaaaggcggtcaacaagataccgtgccgatcgcaccttggggtttaccttatctgcaagattacgttcaaatccggcaacaacgctatttagccgctaacgaacgggccttatttgtcacaaagtatcgcggtcaagcgaagcgaatcagtaactatgccattgaaaaactggtagctaagtactctgaagcttttggcgttcgactaacgccgcataaattccgtcatacactcgcaaccgatctgatgtcagcgacccacagcgaaacgatcgtagcgacccaattgggccaaaccaccacgcaggccacccatttgtatacgcacgtggttgatgacgaacagcgctcggcaatggataagctcgaatgaagcttgattgcttgacatctttgttgtatccggtatactgaaaacgttcttaaaatttaaatattaaccatcgcaaaggggagccattggctgagagtgattagatgatcagacccttcgaacctgtttgttaagacaagcgtaggaattgtgatggagttgagactttaactccttttttgtgttggttaaccaagaaaaggggttatttttatgcaacatcaacggttattgattcaaattgaaggggccattatcgcggcatttgcgatggctctggaatatattccgcatactgtagggccatcagcgattgaggtttcctttgggattatccccattattatctatagtctccgtcgcggcgccgcggctgggatggtttcgggtttaatctggggccttttagacctcgtcttacgaggcctcggcaacgggagcgttctcaatgtttggcaaggattacttgaatttacgattgccttcatggtcgttggcctagctggcgttttacaaaaaccagttcaagcaagtatccaacaaaataccaaagtaaaaacgattgcgctcctttggtccgcagctttcattggtactttcgccaaatacttctgccacttcttagctggggccatctactggggctcatacgcgcctaaaggaatgaatgcttggctctattcattaactgtgaatggcggtagtttcgttgccggcttcatcttaaatggtatcgtctttgggattttattagcgatgattccgaaactatacctcccaaaagatatgtttttaaaagtgcaatctgaagaatagttaacaatacaaaaaagaggccctcagcggcctctttttttaatggtcatttctagcacgtaatgcgtataaaatcgaaactgtgtcgacaacttcttggaataaggccccaattaaagctggcacgacaccggtactggcaatcaacatcaatccgatacagatgaagatcccaatcaaaacggactggcgcgccacccgcattgtatcccgtgcaatcgtgatggcgccactaacccgactcaaatcatcctttaaaatgacgacatctgcggattcgctcgctgctgtggcaccgtgagcacccatcgcaattccgacatcggcactcgctaaggatggtgcgtcgttaacaccatcgccaaccatgattatcggccgctgctccggcgtgacattattgatgagtcgaatcttatcggcaggcaaacacccagcgtgaacttcatcaatgccaacttgagccgcaatctctttagcggttgtcgcctgatcccctgtgagcatcattaagcgctgtaaaccgagctgatggagcgttgacatcgtttgaggcgcttcctggcgaagatggtcgataaatgtgatatagcccgcataacgcccgtcaatgccaatgtagacagttgtctgtgtctgggattgtttagcttggtcaggcgccacaaattcaaatttaccgacttgaaccgtctgtccagatgctaattgggcagtcacaccagcacctgtcatttcttttaaactaataatttctaataattgcgctgctgggacgacttgtagtaaggaacgagccagaatatgggccgaagcctgttcagcactggctgctaaacgacataactccgatggttcaatatcaatcatcggtacaacttgatccacggttaattggccattcgtaatcgtgcctgttttatcaaaagcagctgatttggccaacgccaatttttcaattgtcgtccccgttttgacgataatcccattccggctggcacgactcatacctgagataagcgcaatcggtgccgcgagaatcaacgggcatggcgacgcgaccaccaagacctcggcaaagcgcacagggtcttttgagagccaccatgccacccctgcaatcaaatacgccactaatgtaaatggtacggcatagcgatccgctaaacgaacaaaatgggcaggttgtgctgctgagctttcaaccagtttaacaattgcttgatactgactgttaatagctaattgatcgaccaccatcgtgattgatgtctcaccatttactgaccctgacataattggctcattgattgttctttcaactgggcgtgattcaccggttagagacgattcatcaaacagcgatgacccctcaatgatatgaccgtcaaccggaaccagttctcctggcttcacaacaacttgatcattgacttggagttcgtcgacagcaacatcgacaagtccgtcaccacgcattaaatgcgcgacctggggcgagttgtccaataatgattttaattcccgccctgctttatgcgcggcgtaatcttccagggaatcgccgcctgttaacattacgaggaccatcaaggcagcccaatattcaccaacagcgagtgttgcaatgatcgccgtaatggctagtaaatcaacaccatatcgacctgattttaaagtgcgaatcatctcaatcagcatcgataacgcgactaaccccccagctagactaactaatacttgggcccacagtggttgttgacataaaaaggctaatattaatgcggtaatcccaaccacaattgtgagcactaatttcaacgtatgtttcatcattatcggcctccttgtgaattccattacattataacatgttcattgtcatattagaattattatcatctgtaaaaaagacacaaaaaaacccatcatattattgatgggtctcatttacagaaagttgtgccataatagctgtccgaatggatgtcattgctactattaatgttgtcatccgcttaattacaggcgatgtctttttttggttagccaacgctttttcggttttatggatgattgactcaatcggtgcctgtgccctgaccaatgcttcagcagttatatctgtgcgcccattcaataaatcacgaccaacttccaatgcgtgaattctattttttaataaagtaaattgggcggacccttctccaaattttagctggctcttttgacaatttcgaattgtcgcttcaatcacttgaattgcctttgttacttcctcagtcatctgttgctcctaacaaaaaaataaagccccgcaggactttatcttcttaattgctattaaaatgctgctgttaattgtgggacaacttgtttcttacgtgacacaacaccggctaattgcgcacgatggttgtttaaggtcacatcaaaagccttttcgaaggcttcagctggttcgccgataacaagcgcttctgagttactgtttaagatgtcagtaaccaaaagtacgaataagtcgtaaccgttagctttgttgtctgcttcgatagcagcttcaaaagcagcttggcgtttgaagaccgcttcgatatcaactgtgttaacttgatcgatacgaacttttttaccagccatatcgaatgttttagcatcagcttcaattaattcagcttcgctcttatcatctaagttagtaccagcttttaacatttcaagaccatatgattcaaaatcaacatctgcaatttctgctaatgtcttgatagcaatccgatctttttcagttgttgttggtgatttcatcaacaatgtatctgaaatgatggcactcatcattaaaccagctaattgtgcagggatttcaattttattttcgttgaacattgataaaagaattgtgctggtacagccaactggttcagcacggtagaataatgggcttactgtttcaaagttagcgatccgatgatgatcaacaacatcagttactgttaaatctttgatatcagcaacactttgttgtgcttcgttgtggtcaactagcataacactttgcacttcactaccggcttctttaatcacacgtggtgtgcttgcagcaaagtgacgtaatgcataacttgtttcttcatttggttcgcctaaagcaacagcttcgacatccttgccaagttgttgttgtagataagcaaacgccattgccgcaacaattgcgtctgtatctgggttttggtgaccgaaaactaattctttactcatatttatacagacccttcttttcaaaattacattatcgattataccagagaaattagataattttacgattttgttccttaattcgcgttaaatagtctttttcttctagataaaggttaaattctcggaagaaactgtcaatccgaggaatatcttccttttctttacggaatacaaaggccaattcaaattgaattgctggatcaaattgcaccgcgttcgattcaataccaacattatgggcatcgtaaaaactcttaggcaatgcagtgcttaacccagttgcttcagcaaaccgtaaaatttcaaatggtgatgtaaattgggctgcactgactggccgatctaccatttgattcttataagcttcactgatgaattggttgagatagtattcatcggggtatgttacccatttttcagttaatgtatcctcaaaatgaatcttcttgcgtttcttcaataatggattattactcaagaaaacaaggctttcatccgcaatcttcttggaacggtaaggcttccaatttttgatactgtcatctggcaaatacatgattgcaagatcaattttattattttcgagacggtcccaaatttccttacgtgtcaataaatgaacactgacttcgatattggggaattgttggtaatacttgattaagaaactttgaataacactgagttccatcgatgctagaatcccaatattaattttaccacggctagcgctagttgcactttggatttcatccgttgccgtatttaataaatcgtaaatttgatgagtggcatctaacattgtccgaccggcatcagaaatgtgtaatttcttaccgacagaataaaaaagtggtgccccaactgtgcgttccaatttcttaatttgttgcgttaatgcaggttgtgtaatccctaatagctgagcggcctgcgtatagttcatcgtttccgctaattgcaaaaaataagttaacgttttagaagaaaatatattctcttgtctcgtcttcatgctcaatcctcatttctttgggttatcccttatcattataataataaaaaaataaaaaaagagcaacctttttcggcgctctttcttattattcacttaaaaatttctaatgctaccgctttatacaatttattttgaataatcagctgtatgcaaaagccgttctgcattaacaacccgatcatgagttggtggctcgatgccttcaagtgggtacttaatccccattttctcatatttgacaatccccattgtatgatatggcaacacctcaacccggtcaacattattcaatgtcttaatgtaatcgccaagtcgttctaagtaacaatcataatcagtccgttcaggaattaagacgtgacgaatccacatatgatgaccatgattagacatatattcgatcatttctaaaatatgtttatttgaaaaaccagttaacttcttatgaccttctggatcgatatgtttaatatcaaccatcgatagatccgtatatttcatcaattctttaaacttactgaaaaatggttccttatacgtgaaaggttgcccacacgtatcaagacacgtattaatgccctgtgctttgcattttttaaataaatcaattaagaaatcaatttgaatcagtgattcaccaccgctacaagtgatgccaccttccttaccccagaaagctttgtacggtaatgcttttgcaattaattcgtcagcagtatacggttcaccactaccaatattccaagtatcgggattatgacagaattcgcaccgcatgcgacacccttgtaaaaaggccacaaaacgaataccagggccatctacggatccaaaagattcgattgaatggacatagccaattggtgcttctgtggtttcttctggtacgactgtttctgcggtttccgttgataaacgggttgtaaatttaattgccatttcttccacctcttataaaagacactcttcctagcaaaactgctaaatcaaaattagcagctttacaagaaagcggatagggttagctatccgctgcctcgtttattcttatgaatgactacatttcatcgaagaatgttcttgaaataacatcatcttgttgttccttagttaaatctgcgaagtagacacagtaaccagaaacacgaactgttaatgttgggtattcttcaggatgttgttgtgcatccattaatgtttgtttgttgaagacgttgatgttcaaatgcataccgtggttaaccatgtaaccgtcgaccatgttaactaaggcatctttacgtgcattgtcatcatgacctaaagtattaggtgtgacaccaaatgtatttgaaatcccgtcagttgcataacgataaggaatcttagctgttgaaagtaatgatgctaaagcaccgttcttttcagcaccgtatgctgggttagcaccaggtgagaatggttcgccggcttgacggccattaggtgttgtccctgtattcttaccataaacaacgtttgatgtgattgttaaaacagatgttgatagttttgagccacgatataagtgatgtgtgttcatcttgttgtagaaagtcttaactaaccatttagcgatatcatcagcacgatcatcattattaccataacgtgggtagtcaggattttgtgcttcaaaatcgactgccataccgtcttcgtcacgaataattttaacttgaccatatttaatagctgaaattgaatcaaccgcatgtgataaaccagagataccagtagcaaatgtccggtctaagcgactattcttcaatgctaattgtgctgattcatagtaatacttgtcatgcatgtagtggattgtgtttaaagcattaacgtaaacgtctgctaaccaatctaacatcttatcgtatttacccatgaattctttgtaatcgatgatttcacttgtgattggttggtaagctggcccaacttgtgctttacctaattcatcaatcccaccgttaattgcgtaaaggattgtcttagccaagttagcgcgagcaccaaagtattgaacgccatctgcgattggttgtgcagaaacacaacaagcaatcccataatagtcgctaccccattcgttgcgcatcaagtcatcattttcatattgaattgttgaactcttgattgacacttcagttgcataacgcttgaaaccttctggtaagcgatctgaccaaagtaacgtgatattaggttctggtgcagcacccatgttttccaatgtcttcaagacacggaaggcagtcttagtaacatggtgacgaccatccataccaatcccacacattgataatgttgcccagattggatcacctgagaacaatgagttgtagtcttctgtccgaatgaaacgcaccatccgtaatttcatgacaaaatgatcaaccatttcttgtgcttcagcttctgtgatcaagccgcgatctaaatcacgttggataaagatatccattgttgtatcaatccggccaactgacatcgcagccccgttttgagtcttgatagctgctaagtaaccgaagtagatccattgaacggcttcttgtgcgttcttagcgggtcttgaaatatcaaaaccatagctagcagccattttcttcatgtcttgtaaggcacgatattgttcattaatttcttcgcgaagttgaataactgaatctgtcatttcaccgtcgccaacaccgttaaagtcacgtactttttcttctgctaagcggtcaatcccatagacagcaatccgaggtaaatcagggataatccggccacgtgcataagcatcaggaagacctgtaataatcttgtagtgacgtgctttacgcatatctggtgtataagcatcgaaaaccccttggttatgagttttacgatattcgctaaagattttgtgttgttctggatctgtcttaaagccataagcttctaaggcatcttcagccatccgaatcccaccaaatggcatgaatgcccgtttgagtggtgcgtcagtttgtaaaccaacgattttttcaagatccttatttaaataaccagggccgtgtgatgtgacagttgcaggattgtcgttatcagcatctaaaacaccgcctgcttcacgttcttttttcttaagtgccattaattggtcgtttaaagtggttgtcgcttcagtaggaccagctaagaaactttcatcaccatcataggctgtgaagttttgttggatgaaatcgcgaatatcaatttcatcttgccaatcacccttattaaaaccgtcccaataatcggctaaattgattttttcagtttttaccatgtggattgcctccatttatttaaaattcagtcatacagtttttacacatttagtataacacgtcacaaggtttttgcaaaccctttctttttaaaaacatttaccaactgtcacacgccttaaaacactgctatgtaagtgtcagcacttcattttataacaagttgtccgttcaatttagattgtgcaaaaccttttaagtgttatggtacagattccgaattttcgcttcttttatataacagaaaaggacactaattaggttaattagtgtccttttgattaatctttatggtttgaaattggttcgctggattgtgctaaaacaaataccggttgaccaacttcttcaacatccatgacgaagctcccgtttgaataacggtcacctgttgcatgcgcttgtggttcaattgttaataatgcctgttcggttttcactaataatgtgatcttaggtgcgactctaatcatagctgccacccgatgcggatcacgttttagttcacgtaggattaagaccccacgccgagcacggcttgttaagccaatttcgcttaagaacatgcgtttaaaggccccacgttgcgtgataattgccacagcagcgtgtttttcggttggatcaaagagcgtaaagttagcgacgtgatcgccatctttaaggtccatcagtttcacacccccggctttggcaccagagactgatacttcgttcaaggcaaaactgagcccgtaaccgttataactagcgctaaagacggcctgttgttgggcatctgtttcagagacccaataaacattcgtcacgttcgcaccagcatgcagtttgataaagtcttgggcttttgaacgataagttcgacttggcaataagtcttggaaagctgtttgcttaatataaccatctgtcgtcccaatgacaaaataaccattttgctcgtttggtgtaaagctaaaggccgcaataatcgcttcatcagctgctaagccaattgattgcgaaatatgttcgcccatttctttccacttcaaatcggcaatttcatgcactggtcgttgaatcagatgaccagagttggtaaataacatcaattgatcgagtgtctgcattggcttttgtaagatggcaaaatcgccttctttcagaccaccgtcagctccttctgaggcttgataagaacggaggctactccgtttaaggtagccatcatgactaaccgcaaccatgacagtttcatcaatcacagtcacactcgtatcaatctcaagggtttcaatttcggcttcaatttctgtcttccgatcgttccggtaagctttaaccaccgattttaattcagacttaatgacccgtgcaagttctttaggatttcccaaaatagcttggtagccttcaacagctgtttttaattcagcagcttcggcttccaaggcagtcacatcggtattcgttaaacgatacaattgcaaggaaacaattgcttcggcttgtgcttcagtaaaatcatactgtgccaccaaattcgtcttagcgtcttttttattcttacttgcccgaatcgtactgattacttggtcaagaatcgataaggctttaacaagaccagcaacaatatgcaaacgatcttgtgctttttgtaagctgtattgtgtccgccgcgtaacgacttcttcttgatgtttcaagtacgcgtgcaaaatttcaagtaagccaacttgtttaggttgcatatcagagatagcaaccatattgaaattatacgtaatttgtaaatcagtattcttgaagaggtagtttaaaatcccttggctatcagcttgttttttcaattcgatgaccactgacaagcccatccgatcactttcatcacggacttcagaaataccgtcaaccttcttcaagacccgtaattcatcaatctttttgaccatttgggccttattgacttcatatggaatctcgctgacgacgatttgttcccgattaccgcgtaattgttgaatgctagttttagcccgcacaacaacgcgaccacggcccgtttcgtaagccttcttaatcccgtcaaggccttgtagaatccccccagtcgggaaatccgggcctttaacaaaggtcatcattttttctagcgttgcgtctggatgatcgattaaataaactaacccatctgtgacttcacctaagttatggggtggaatctcggttgcataaccagccgaaataccagttgccccgttgaccaagaggttcgggaagcgggctggtaaaacagttggttcttcagccgtatcatcaaagttcaggacaaaatcaaccgtctttttatcgatgtcttttagcatctcactggcaattttgctgagtcgggcttccgtataacgcatagcagctggtggatcaccatccatcgaaccgttattcccatgcatttcaattaatggttcccgtaatttccagtcttggcttaggcggaccattgcttcataaatcgagctatcaccatgcggatgaaaattacccatgacgttcccgacagacttcgctgatttacggaatcctttgtcataagtattgccatcaattgccattgcgtacaaaattcgccgttgaacgggttttaaaccatcccgaatgtccggtaatgcccgttcctgaatgatgtatttggaataccggccaaagcggtcgcccatgacttcttcaagggttaactcttgaattttttgtgcttcatcagccaaattaatcactcacttttctaatcgtctaattattctactgcgttatcgtcggagactggtgttgctgtttgccccgttgtctctaaaatgctgccttcttcagcgagcgtgaatttcacattttcttcaatccacttccgccgcggttcaactttatcacccatcaaggttgtcacccggcgttctgccaaagcagcatcgtcaatccgaacacgaattaaggtccgacttgatggatccatcgttgtatcccagagttgatcggcattcatttcacccaaccctttaaaccgttgttggctataacccttacccatatccttagcgacaacttttaattcatcgtccgtccaagcataggcaatcttcgttttagcaccggcgcctttttgaagcttgtacaaaggtggtaaggcgatatacactttaccggcttcgattaatggtcgcatgtaacgatagaagaaggttaagagtaagatttgaatatgagcgccatcggtatccgcatcggtcatgataataatcttatcgtaattgctatcttcaattttgaattcagcgccgacaccggccccgattgtatagatcatcgtattaatttcttcgttttttagaatttcttgtaattttgccttttgggtattcaatactttcccacgtaatggcaagattgcttggaacttccgatcacggccttgtttagctgaaccaccagcggaatccccttcgaccaagtacaattcatttttggccgcgttcttagattgtgcaggtgtcaacttaccagagagtaagccgtctgattttttctttttcttaccgtttcggctttgttcacgcgctttacgggctgcctcacgggcttcacgggccttgagtgactttctaaccaatgcttgggcgaattccccattctctagtaaaaagaagctcatttgctcataaacgaggttgtcgaccgcggttctagcctgtggtgagcctaacttacctttggtctgaccttcaaattgtagtagttcttctgggatccgtacagataagacggcactgagtccttcacgaacatctgagccttccatgttcttatcccgttcttttagcaaattaaccttgcgcgcataatcgttaaacgccttagttaacccagccttcatcccggcttcatgcgtaccaccatcaccagtccgcacgttattaacaaatgacatgatgttttcggaatagccgtcattgtattgaccagcgaattcaacttcgatgtcttctttggtgccttcaaaatagagtttattgccaatcgtgtctttatcctcgtttagataatcaacgaatgattgaatcccctctggataatgaaagacatcttccttagcaggatcagcacgtaagtccgttaacgtaatcttaacgtcttttaataaaaaggctgattcccgtaaccgttctgctaacgtattgtaattatacgttgtgacttggaaaattgatgcatccggtttaaaagtaatcagtgtcccgttaggttcgttagctttaccaaccttttttaaagtgccgactggatggccgccgttttcaaagcgttcttcataggcaacgccgtctcgaacaacccggacggttaaccattcagataacgcattaacgacactggccccaacaccatgtaatcccccagatgttttgtaactattctgggtgaacttaccaccagcatggaggaccgttaagatgacttcaatcgttggaatgcctgattgatgcatcccagttggcattccccgtccatgatcacgaacactaatactattgtccgcaccgattgtgacgttaatttcggcaccaaaaccggcgagtgcttcatcgaccgcattgtcgacaatttcgtatactaaatgatgtaacccacgcccatcggttgagccaatatacatgccaggccgttttcgaactgcttccaagccctctaagacttgaatcgaattatcattataatcttgtttttgatttggcattcaacaatgactcctttgtctaaaaatgaacagataagttatattatcaacaaatttgaacgattttacaatccctaaatttaaaataaccacttatccaaatgtatgttcgcattcatctattctaacatacaatattccttttcccttgtcaaaatgctagaatagattaatcaaatgttgtgaataggagttctgacaatgaaattaagtcttatttttatcttggcctacctgattggctcgtttccctcaggcgtcattatcggccgggtcttttgtcataaagatccccgggatgctggcagtcataatattggaacaaccaattcttaccgggtattaggcccaatcgctgggacggctgttttgttcctcgatattttaaagggtactttagcagccagtctaccaatgatttttcacacctctaatcattcattggtcttagtcgttggtttagctgcggttattggccatgcctactctatctttttacgctttacaggtggcaaagccgttgcaaccagcgctgggatcttactggcctacaacccgcttttcttcgtgatcgctagtacgatttttattagtgtcattttaatcacgagtatggtcagcatggccagtatcatcggccccttgctaattgctatcttgtcattttacacacacgactggttactcggtacgattgcgacgttagttctaatctttttaacctaccgccatcgcgagaacatcagtcgcattaaaaatggtacggaaaacctagtcccattcgggttatattaccgttataaacaaaaaaaacgccaataaaggcgtttttttgtgcgatcatttaaagatcaattaattgttcgcggtcattataaaatgaatgataggctaagtagcaggcaataactgacccgagactcgtcgccgataatagcatgaaggtgactaatatttgatacataatagctttaaccggatcaacaccggcaaagattaaccccgacatcatccctggaagactgaccaggccgaccgtcttggctgaatcgattgtcggtgacatccccgttttaatactttctctcacaattgcaattgaggcttgtttcaagctagcgccgagtgctaagcgttctaacacagcttggcgttgatccttaaattgcgtcaacatactccgataacttaggccgatggcgaccatcgagttagaggcaatcatccccgtaatcgggataatctgcgatggcacgaatttaattgcgccggataatactagtaggccgagtgtaacaccggtactcgttaaaatggcgattaatgaaatgctaaacgcgtgtcgtaacgtactagcgcgtttacgcgcattagccgccgcgttaaagataatgatcaacatcatcgctagcgttatccagacatggttaatttgaaaaataaatttcaataaataacccacgataatcaattggacaatcgcccgcccgacactgattagcatatccttttcgagaccaattttttcgtggaaactaatgattaaagcgacaaagactaacgaaacagcaaaagttagtgataacccgttaacggctagattcatctgcatgtaccaaacaaccagccacaatttgaagctgacgccctttccgttgttgttcttgtgtatcatgggtaatcgataaaaccgtaatcccatcttcttgattcaattgcgtaatcaacccattaacctgcgctttagtctgttcatctagtccagtcgtaatttcatccagtagcaggatctccggtttaaacattaggttgcgaattaaagcaatccgttgtttttcaccgcctgagagcgtcgtaatcttcttagtcaacggcatgtcggctaatcccactcgggctaattgcgtcttaactaacgtctcatccaccggtaattcgcgaatttcaaacgggaatactagattatcaccaactgactccccaaataacgttggttgttggaaacaataagacacgcgttgccgatattgcgtcggtttaaaatcggtaatcgactgacctgccaacaagatctccccactcgttggtgtcaataaatcggctaatagccgcagtaacgtactcttaccactcccagatggccccacaatcgtattgtaagacccttgttcaatcgcgatgttaatatcgctcagtattgattggccatcaacgctataattaaggcctttcgtctctaactgaagcatgataccctcccttaaatctgtcattatttctagtatacgcgactttttaatttttagggtaaacgatgattgataagtagcgcgagtaacgcttatactagcaatagggactcttaattgaatatcgccaattaagctaccacaaacttaagaaaagagatggttacaatgttaaacagctttccccaagtcatgacaatcgccggttccgactctgatggtagtgctggcgcccaagctgatttaaataccttcttcgcacgcggtgtttatggcatgagtgtcctaaccgcctgtgtcgctggtaactcatttgggattcacgcgagccaagcgctaacccccgagtttatcaacgccgaatttgaagcaatcgccgcagactttaaggtccgagcttgcaagacagggatgctcaccgatagtgagacaattatgacagttgccaagcagctcaagcaacacgattttggccccttggtcttggatcccgtcattattacaaaacacggcgcactattgcttgctgatgaagcctaccagacgctaaaaaccgaattgattccaatggcgaccgttttaacgccgaatttctatgaagctcaaaaattaaccggtattaccttaaatgaaccggccgatttccaagctgctgctgaaaagctactggcaatgggtgctaagaatgtgatgatcaaaggccaccacgctgccggtcaatcaatcgttacggattacgttcgactagctgatggtcaagaattctggttatcagaaccctatatcgaaacgacccacattaacggtacgggcgattcactttcttcatgtatctgtgctgaaatcgctaagggacattcgattgaagacgccattaaaacggctaaaaaattcgtgcacgccgctattgctaatccaatcgacgtcggccacaaatatggtcccatcaatcatcacgcgcaataaagtttaatatttttccgtatcaaccgcatataacggctgatacggttgccctaaaacttaaccagcaacacgattatcaatcgtagccacttttcttaaatcagtgcgtacaggccacttaaggcgataagaatagcaaaagacccgtcaaacgttacttaaaacgtctgccgggtctttttttagtgttctgcttcttcaatatcggcgttaattgccttcaaatcgaaatcgctgtttaaaaaatcagtatcatggcttggaaaatgttgctcgaatgtctcaaacggttgtacggttaattgggcgtcttcaatcacataatctaagacgtggcccccaaaatcgtgcgccgtgtttaagaagtgcacgtgataacccgcaactgcggccccttgatagagcgttggtgcgtagtaaccaactagcgtgccagtcacgccatcttgctcaaactcgggctgcacgcgcgttgcatccgtcaaattaggataaggttcttgttgcgcctcaacggcacgcgtatgcatctttttaaagcgaccggttaccttaacggcaaagaagaggttcttcaatggctgttgtgctaagatctgcgcttcaagttccgccttagtcactgttccgagtgtttggttcggtagttcaggtgcttggaaatgaactgtcgcaaagggcaccatgtcagtgggggcaagttgattaacctggccctcaccggttacttggtaggcttggccatccaagataatcatttcacctgctaagccatgcgccgtgccgataccaaaatcaccatgggttaataaatcggcaaccgacaaagtcccggtaaataaaccgggtaccaatagtgccaatgtgccgtgttgataaacgcgttgataatcaaatgtcattttatacttcctccttcacaccaatcaaaaagactaaacgagttgatctggtaataaggcttgaccaagtagcttattatcactgtaatcgactggaatatcgacaatgactggaccatcagttgcaaaagcttggtctaggactttacctagatcggctgctttttcaacacgtaagccagtagcgccgaagctttcagcatatttgacgaaatcaactgggccaaattgaacggctgctgattcgccatatttcatttcttcttggaacttaaccatgtcatagtaaccatcattccagatgatatgcacgatatttaagttcaaacgaacggctgtttctaaatcttggcttgagaataagaagccaccatcaccggaaactgaaacaatttgcgtattaggacggactaaagcagcactaatggcccatggtaaagcgacgcctaatgtttgcatcccgttactaaagagtaaatgacggggttcgtaacttctaaagtggcgtgccatccagatataatgactcccgacatcgaccgtgactgtcatttcatcagtcacgcgttcttgcaactcagacacaatattcaatggatgattgagtgtcttatcggctgacatttcaggtgctgtatcccgttggtgtaattctgcgtggagttccttgaggtagtcacgaacatcatcggctaattgatagcccttcatgtatggtaataagaaatcgagcgtttgtgcgatatccccaactaattccttttcaggttggaaattatgatcaatttcggcacgcatatcatcgatgaccatgatgtgcgcatcactttcggcattccagttacgtggttcgtattcaattgggtcgtagccaatcgcaatcaccaaatcactgcgttttaagatccgatcgcctggttgattacggaataagcccacccggccgtaaaaatcagtttccaattcacgtgagaccacccccgcggcttggaaagtttcaacgactggaatgtgagtttcggcaattaaattccgaatagcagcggttacttctggtgaagaagcccgcatcccgactaataatacgggaagtttcgcttctttaatccgttgggctaacaaggttgtttcaactggactagcaggccctaatttaggtgcgattaaaggtttaattaccttagattgaaccttagcatccgtcacatcttgagggacactgacaaagctagccccttgtttagctgattccgcttcttgataggcattggcaatcacttctgataaattttcaggttcttgcacttctgcactaaacttagtaattggtgcaaagagcgctgcattccgcatactctgatgggttaaccggagtaaatcagctcgtttcacttgtccagcgattgctaagaccggatcaccttcagcagtggcggtgaccaccccggttgctaggttactagcgccaggaccagatgtggccatcacaacaccgggtttaccagtaattcgaccgataccagcagccataaacgccgcattttgttcatggcgtgctaaaatcaattgaggtgttttaggattgacggggtgttctagtcgttcaaatactcggtcaattttggcgcctggaataccaaaaacatattctacttcatgatttactaagctatcgataattgcatctgcaccatagtactcttttttgtcagtcatgatttccctcacttattgtttaataattcttatcttagcatgcaatctatttaaaaactagcacgtttgcttcgtgtaataccgagcaaaaaagcgcttctctacgagaaacgctttatattaactatttaactgtaatttcgtaactggcattaaatacttcgccgggtgctaattgattgacaccaaatttttctgaaagttcaccagaagcgtcaacatcatctgcaatcccccaccaaggttcaagacaaactaattcgccttccgttgggtaaggtgaccaaacaccgataaatggggcgcctgatactttcaaactgatcgcatgatccgttttttcagaacgaatgctaaatttattttcttgaccctttaattcgtaaattaaggcatcatctttgaagagtgagtgattaatatcagtcgccacatccgttggtgctaatgtgcgttcatttagattgatgaatgccccttgcaatggaatcttgacgcgtgatttttgtggtcggtagtctaaaaagtagtcttcaaattgggtatcgtccgttaatgggactttaaagccggggtggcccccaacagaaaagtacattgggccagattgcgctgtatttttaacatcatagtccacttttaagtgcatgtcgtttacttggtaaaaaacgcgcagttcaaattcaaatggataaatttttaaactttcttcatctgatttcaataagaatgtcacagccgtatcagtttggctttctacttcaaattgacgatcacgggcaaagccgtgttggcccattgggtaagttttaccttgatacgtatattgatcattcttagaacgcccaacaaacgggaataaaacgggtgcgtggcgcccccaaactttgggatctgcttgccagagatattctaagcctgaaacagcccctttaacactctgtaattccgcaccttgtggactaagtgtcactgttaaaaattcatttgcaatttggatcatttttaaaaccacctttagaaatttatagaataaagcgggttaaatctttatcggctacaatcttaccaattttatcattaacatattgttcagtgatggtgatatcacccatctgcatatctggtccttcaaagagaatgtcttccaacaatttctccaagatggttgccaagcgtcgcgcaccaatgttttcggtgtcgtggtttacttggaaggcaattgcagcaattcgaccaatggcttccatcgtgaaggtgacgtggaccccatctgcaccgattaaagccatatattgcttaacaagcgcgttgttaggttccgttaagatccggacaaagtcggcttcagttaagtcttctaattccactcgaattggaaaacgaccttgtaactcagcgattaaatcacttggtttagattccgcaaaagccccagaaccaatgaagaggatatggtctgttttaagtaccccatatttggtattaacttgtgagccttcaacgattggtaaaatatcgcgttgtaccccttcacgtgagacttcgccagattgtttcttaccaccggcagcaattttatcgatttcatcgataaagataatcccggtattttcggctctttgaagggcatcatgataaatatcggcatgattaaccaacttgtctgattcttcttgaatgaagatttcacgcgcttctttaacggtaacggttctgaccatcttctttttaggcatgattgagcctaatgtatcgttcaagtcaattcccatttggcccatcatatcgttcattggtgcggcctttttaggttcgtcaacttgaatttcaatttcgcgatcatccaaaagccccttatcaagttgctccttaacagataaccgttgatcgcgtacttcgtcggttacttcttcggtttcagcttggtttaaaccagctggtgtttcaccattttgaagggccgtgaacatcgacattaagtcgttcatgctattgttatttttacgttgttccttcttgataccagggactaataattttactaagcgtttgtctgcttgacgagccgctttaccacgcacattcttgaattgttctgattcttccatgtgaacagcaacatccgctaagtctcggaccattgattcaacatcacgaccaacatagccgacttctgtaaatttagtggcttcaaccttgattaaaggcgcatcaacgactttcgctaaccggcgagcgatttctgtcttaccgaccccggttggtccgatcatcaataagtttttaggtgtaatttcttgttgcatcttagtgcttaattgcatccgacgataacgattatacaaggctaccgctacggcttttttagctttatcttgtccaattacaaacttgtctaattcagcgacaattgatttaggtgttttattcatcaaatccattggggccacctcctaaaatgattccacaatcacgttgtggttcgtataaacgtcgatgccaccagcaatattcacgccagtttcaacgattttttcggctgttaattcaggcttaccttctaaaatcaaggccgttgcagccgcttgggcgaaattaccacctgaaccaaccgcaatcacttgatcccctgattcagcaagtgtatcaggggtaatgacttcaccgttacctgagatcaaaagaatatctgtttcgttaatggcaatcaacattgcttctaatttttgaagcgttggatctttacgccagtcctgtgccaaggcaacagcggcgtgttgtaaatcacctgagtatttttctaatttttgttcaaaccattcttgtaacgtaaacgcatctgcaacgccaccggcaaaaccaattgcgactttattgccataaatccggcgagtttttttcgctgaatcttttgtgacgaatttttcgcccattgttacttgtccgtcgccagcaattgctgttcgaccattatgttttactgcacaaattgttgtcatttgatttgctcctttaaatagcgttaatcacattttagcagtctttaagactgtgtgctaattctatcgctcttttttgttaaaaaaatcgttctttagtcctagtttttagcccgtgggaagaactgacggtaatccttttgcaaatgggccgtcgtcacgtgagtgtaaatctgggtcgtcgacaagctactgtgacctaataactcctgaaccgttcgtaaatccgccccgtggtctagtaagtgggtcgcaaaggtatggcgaatcatatggggatgaatcccactggttaaactggtctttttaaccacttgatccaatgcgtattcaatgccccgactggtaattggattccctaaatgattgacgaaaaccacatcgtgttcttgctggcgtttggccatcaattgcacccgaccattgtttaaataatcctgcaaagccttagtcgcgtgattgccaaaaggcacgtaacgatccttattccctttaccatgtaccaaaataacccgtaaaccaaaatcaatctggccaatcgttagttgggcacactcgctaacccgcatccccgttgcatataataactccagaatggcgcgattacgttgcgtcagcggttcttgtccgacaatcgcggcaaataacgcatccatctctttttcatagaaaaagcggggtaacttatggcgttgtttcttgagttggaccgtttcaaacggatcagtctgtaaaaattcgttgcgtatcaagtagcgataaaacgaccgcaaacttgaaatccggcgtgcaatcgtttcgccactatattttttttgatccatttcattcaaataagtttgtacttcaagggtaccgacctgtttaaaggaggtcaggcccccattagcggccaaaaaatcgacaaacgccttaatatcggcttgataggccttttgcgtttctggtgaatagtgtcgatcaacaattaagtattgtaaaaacaaattaatccaatcttgttcaagcgccaaaaaaatccctccaagcttggttaataatactttaccacaagcttagcgggatttaaaaggtgtttacctagagtgtttctttaaatgtgtcaatacttgctaacgcacggtctgcaagtgcttgattccgttcttttttatcgcgaattcgttgttttaagggttcgaaaattccgaagttcgcattcattggttggaaatgtttggcactggtatgcgtaatgtaatgtgccattgaacccattgccgttgttgctgggaaagtaactggttctgtgtctaatgctaaacgagaagcattaatcccagccactaagccagaagcagcactttcaacatacccttcgacacctgtcatttgaccggcgaagaataaatcagaacgttgttttgattggtaagttggtaatagcacgtctggtgatttcatgaaggtattacgatgcataacaccgtaacgaacaaattcagcattttctaaacctggaatcatccggaaaacgcgtttttgttcgccccacttcaaatgagtttggaacccaacaatgttataaagacttgcagcggcattatcctgacgtaattgaacaacagcataaggttgttcaccggtcttgggattttcaagcccaactggttttaaaggtccgaataacattgttttgataccgcgttttgccatgacttcaattggcatacaaccgtcgaagaatttttcatcttcaaagtcgtgcatttcagcaacttctgctgaaatcaaggccttataaaaggcttcgaattccgcttcagtcattgggcaattcaagtaagctgcttcacccttgtcataccgtgacttaaggtaaactttatcaaaatcgatactgtttttatccaggattggtgcagcggcgtcgtagaaatacaaaccttcactaccgtttaacgcactgatttcttctgctaagccaggtgacgttaatggaccagtagcaactactgtagggccttctgggaaagcggtcaattcttcgtgatgtacggttacccgttcatgattagcgagtttgtcggtgaccgtttgtgaaaatggtgtccgatcaacagctaacgcaccaccagcgggaacggcattttcgtccgctgcagcgataataattgaatctaaacggcgcatctcttctttaatcaaaccagccgcattcgtgacttgatttgcccgtagtgaattggtacaaactaattccgcaaattgttccgtgtgatgagcgggcgtcattttaaccggccgcatttcgtataaatgaacatcaacaccgcgtttggcgatttgccaagccgcttcggaaccagctaagccggcaccaatcacatttacaaaaggttttgtcgtcatctaattacctcaaattttctcttatttttgaacggcttcttcataatcaccattaggacagatgacttgtttgccgcctttaattttcttttcaactaagtaatgttcacacttaggacagtttctgccgactggtttatcccatgtgacaaaatcacagtctggataacgatcacagccgtagaataaccggtttttcttagatttacgttcaataacttgccccttgccacacttaggacatgtcacaccgatttctttgacgattgccttggtattgcgacaatctgggaagcgactgcaggcgaagaatttaccataacggcccattttgaccaccattggcgccccacaaatatcacaatcgaacccagccggttcatctttaatctgaattttttcgatttgaacgctagctttttcaacttctttttcaaaaggttggtagaaattatcaataatcttgatccaattttcttggcccgtttcaacttcatccaaacgatgttcaagatcggcagtaaagtcgatactgacaatatctgggaagaattcgacgattaaattattgacgatttcacctaattccgttggttcaaatcgtttagcattcaacttcacgtaatagcgtcgttgaatcgtttcaatcgttggtgaataggttgagggacgaccaacgccgttttcttcgagcgctttaaccaagttggcttcagaataacgtgccggtggttgcgtgaaatgttgcgctggatcggttttagctaatttcacttcatcgccaaccgctaattcaggtaataagttatctttcgctgaatcttcggtatcgcgggatgaaacgtatagcttagtaaaacctgggaagcgcatttgtgagccattagccttaaataagacgttgttttggttaatcttaaccgccactgtatcaaagacagcgggtgtcatttgactggcaacaaatcgtgaccaaatcaagttgtaaatcttatattgatcgtttgttaaaacatcttttaagctcttaggtgtccgcatcacagaagttggacggattgcttcatgggcatcttgtgcgccttctggatttttcgtcttatgggctttaacagcggcgtattcttcaccatagttatcgtgaatgaattgtgacgcttcgtgtttggcacccgttgaaatccgggttgaatcggtacgcatatacgtaatcaacccaaccgtgccttctttacccccgagattaatcccttcatataactgttgggcttgcatcatcgttttacgggttctaaagtttaacttccggttagcttcttgttgcagtgaactagtggtaaaaggtgccgccgcaaaacgcttgcgttcacgctttttgacatcttcaattgtaaaaggttgcgtcttatcaatttgctttaagacatcttgtactgcatcgttattgcctaaagctgttttcttaccgtttaaaccgtagaaactagctttaaatttactgcgacccttcttgaattcggcatctaatgaccaatattcttcaggtttgaaagctttgatttcttgttcgcgatcaatcacgagttttaacgcaactgattgcacccgaccggcactcaagccttttttaactttttgccagaggagtggactaattgaataacccacgattcggtctaatacccgtcgtgcttgttgggcatcgactaatttcatatcgatactacgtggatttttgaaggcactcttaacagtgtctttggtaatttcattgaagaccacccggtttttatcggttggatctaattttaaaatatgcgaaacatgccatgcaattgcttccccttcacgatcgggatcggctgctagatagatatgatccgcttttttagcgtgtttctttaattctttaattgtttcgcctttaccgcgaattgaaatatatttaggttcataattattttcgaaatccacacccatttgactcttgggtaaatcgcggatatgacccttacttgcaacgactttatagttgcgtccaagatatttctcaattgttttggcctttgcaggtgattctacaatgactaaatttttgcctgccatggacaaacccctttcaacagaacgctttgttcaaaatcgtacataataatatgtgacgtgggcgccgtttgtcaaatctaaacgcgcgctagtgattatcagattaaagcatagcataggtttcccagtattcaaaggaaacttatcagaaaaacagtggattataacaaattcataaccaatcctaccgcactaaaccacaaaaaaacaaggtgtgataaaaaataatttttatccttaccttgtttttttaagcgttgacttgcgcactattagctaagatatctgcaataatgccggccaacttaatttgtgccatctgatcttcagccgctttttgaacctgatcataagcgtcattcaatgccgattgaatattagcacccaccaaacactgcggattggtcttttcatcgatgtgcaacaattgctgatcagtatcaagcgcctgatagacatctaaaacactaatctgctctgctggccgggctaatttaggcgcaatcgtccctggacgactctccaataagtcagctttcaccaaaagggacatcaaccgacgcactaagctcgcgttggattcgatactgccagcaattgactggctcgataagtccccatcttgataaatttcgacataagctaagatatgaatggcatcacttagtttgtgggaatatttcatcgtttaacctcaatttcaaacggattctctactttgattctgctggtaacaattcttgaagggctgcggttaatgatggtaatggtcgacctaagacatctggtaaatcacttgaaacttcatctaattcaccatcacgaatcaagctttgaatcatcgtaacaacaccaacgacttcagcaggtaaaccacttgcttcaagccctttttgatactcagcaatacttaatgatgataccgcaaattcttgattagtcaattgtgcaacactttcggctaaatcagcataagttgcgggtgcaccagcgaattcataaatgtcttttgcatcagtcatggctaataccttagcggctgcttcagcataaagacgttcaagtgtccaaccaacatgactgtcaccagcgccataaacaaatggttgaccggcaatagcacctttaattgtatcgagttcgttttcaagataccaattattacgtaagaaagaatgcgcaataccagattcgataatagccgcttctgttttacggtggtcttcagctaaaccagaagttgtttggtcagcgtgggggaaacttgtataaccaatccagttaacaccggcttttttagcagcccggacaacggccatatgttgttgatcacgtgggacttctgcgcctggttgcgatgagatgaatagtaggcgatcaacaccttgtaatgagtctgctaatgttgcttcttgtgtataatccccagggcgaacggtaacgtctgctggcaccatcttttgggctttttcaacgttccgtgccaaaccaataatatctgaagcaggtactaattttgctaattcgtgaacggctacttggccaaaacgtcctgttacagctgtaattgcatatttcataatttaaaatccccttagtggtttatttgttactttataagtaacttgttgttttaataataacaggagggattatgaatgtcaaccaaaacagtttcgcttaatcaaaataacgtagttcttctattaatatgtttttatctaacaatggtgtcgctcccgcggcgattaattggttgcacccctgtgacagtgattgatcaatgcgccccggaattgcatagacattgcgattagcttgaagggccaagttagcggtaatcaagctaccactcttgtgccgggcttccgtcacaattaaactatgacataaccccgcgatgattttattacgggctggaaattgatagcgccgggctggtgtaccaagagcgtattcagataataacaaacctttttcagcaactacctgttgtaaatgctcattttgtggtggataactgcaattaatgcccgtgccaatcaccccaattggggccaaaccacgctgcaaggcaacttcgtgggccatcgcatccgctccttgtgctaacccactaataatcgtagtggcagttagtccttgtaataactgttctagtgattgtttagaataatgagtcgcttgacgcgccccgactaccgcgagacatggctgttttaacaatcttaaatcaccacgataaaataacaaaacgggcggcaaataggtttccaataagcgttgtgggtaatctttatctaagatggttaaataagtcgttcgaacttcatgttcgatgcattggcgttgtaaggttgtactttgaaaacttgcttgaaaagtcggccaataacgttccggcaagcgcgtaatctgcgcaatttctaacgccgataacgcccaattatgactggttgctagccacgccgccaagcgtaattcactaataggcccaaaacccgccgctaaatgtacttttaagagtaattgatttttagttaacacaaaaacagctcctttacgttaattaataatccgtaaaagagctgttttatttttctataaaacgttttgaacaggggaaaaactgcgacgatgaattggtgtaaccccgagttcagcaagccccgctaaatgcttagctgtcccgtaccccatattgttggctaaatcataacccggatattgttgatcgtaattaatcatcaattgatcccgaatgacttttgcgacaatgctggctgaggcaatactaatactgcgggcatcgcctttgattaatttttcttggggaatatcagtcggtacggtcattgcatccactaataagtagtccggttgtttatccagaccagcgactgcttcacccattgctaattctgttgcgtggtaaatgttttcggtatcgatccgttcaggtgacgcaattccgatactaacactgactgcctgggccataatctctcgatacaactcttgtttgagcttaaatgacagttgtttggaatcattgacctgccaaagatcaaaatcatggggcaaaatcacagcggccgtcacaacgggcccggctagtggtccacgacccacctcatcaattccggcgaccaacggataatcaggccagagcgctttttccatttgacgccgttcttcaaaagctgctttttgagccgctaattttgccgctcgcttatgatattgaactaccaatttctgaacaccggcccgcgaatcagccgcaaaagtggccaactgctcttcggtcactggtgcttgtaataattgcttaatttcagcaatcgattgtgctttggtcatcttatgacgcctccactgggacaacgtctaaagtgaagcgacctaatttaccttggcgcgcatcattaatgaacttcacgcagaaacggtcataatcttctttgaagcctaaccgtttggttaaaatcatgattaattctgcagctggttcttcaagttcggcatctgtcaccttataaactttttgaagttgacttggataatattctttgaagtgttctaaggcaaaaataacgacatcatctggatgatagatggcatctgaaatcgcaccggtaagggctaatttactgccgattgttgggtcttcaaacttaggccataaaacccctggtgtatcgagcaattcaagtgtttgtccggctttcaaccattgttggttcttcgtcacacctgggcgattacccgttacagcgatattcttttgaactaaacgatttaaaatcgttgatttgccaacgttaggcacgccgacacacatcgcccggatgaccgggttacgaatccctttagcacgttttttagccaatttttcagctaaaatttcttgtgctactttttcgatcatgggtaacttagccttatgctgtgcatcaagggcaattgcggtaatgccgcgtttcttgaacgtttcaatccattgttgtgtccgtcgtggatcagccatatcggccttattcataattaatagaatgggtttgttttgacctaattcttgaatcattggattaattgaagattccggtacacgggcgtccacaatttctaaaattaaatcaaccgccttgagccgttctttaatttgtttttgtgctttggccatgtgacctgggtaccattgtattgtcataataactcctttattactgtttaagatgaatacatctcttaccgatagtattattcttaattctatcatacctcagcgcgaacttgacggcttaaattaaaaaggttacgacccgcagtcgtaacctttctcgtttatttaaaataagtgatatcttcaaacggccaataaacgcctactgcgcggccgataattgtttcacgttcgattgttccaaacgtgcgactatccttgctaattcgacgattatccccgagaacaaagtattggttagccggaatccgatcgtgatccgttaatgtttttaaatcaaaatcggaggttaaaaccgtcttttgctgcgattgcttcaaaaaagattccacgactggccggtcattaacgtataattggccctcttgataagcgatatgctcacccggtagaccaatcacccgcttcacgtaagtggtcccattggctaagcgaaaaacaacaatttcaaagcgatggacctgcccaaactttttcaataagagttgatcacccgatttaagggttggttgcattgaattcccagcaaccgtcgccggcaccaaaaagaaggaccggatgacaaaagcaaccagtccggccacgagaattgctaaaaaccaattacctgcgattgctagtttccgtctcattaaatcgcctcaatcactgttttactatgcctgttcgctttcttgatatagctgataggcctcgtcaaaaattagcatgctcggtaaataactaccgtttaactccaaatattgggataacagttcatagtccccttcatgtttagggaatgattgatcgaagaaagcattgttggcaaattgcgcaactggttcgtagttattcggatcgcgttgtgtcatgagataccgatagaaactctgcttcattttgcacaccttatttcttattttttagtggcacgtatacggataaatcaatcttatcgttcttcaaatcaatatggcgggccttgacttgcatcccgttagctaacttaaattcattcaagcgcaaggtaatgcgactcttatgcgcatttaaaacaacccatttagggaatttatattgacgttgaatgtaattaaaaacaaatgacatcggtactttcagttgaccgacagctaattgcttagcacgtagttgaatatcaccgttttcaagcacatatggtttgaaaaagaggttgaattcgaccggaaagcctaaaaatttgaattgaccagaaagaattgcttgttgatctagggtaaagttgtacttcacctttgaattctcgaggtagttttcaagataataggccactacactattaatttgcttcttgtgcatctgaatatcaaaggtactgtcagctttgatcattttttcagtctgaacttgcttagtttgcggtgcactaacgttataggcgataaaaccgagcgtaccaatcactaatgctagtaaaacaataaagctatatttccaataattaatcgttcgtttaggactaacttgttccttttttaaatcttgtctggtttgcattaactaacttccttacttggtccaatctttttggtgtgcattcatctgttgccaaaaagcgttggtgatgagttgataccctttttgattagggtggaaatgatcgtcgtcgctaatatagggattgagatgctcgttttctgcaagtgttttttgcagtttactactgtccattttagcgagcgattttgtttgtttcacataatggccgtcaccatgcgttaaaagacggtcgctattgatataataagccgactcaaagtcattagcaacttctttgactgtcttattccacgctgtcacggcttttgacatccccgtaatctctgggaagtaaacgtaaaatggattatagacccccatcacgaaaattggtgccgttggattttgttggcgaatttgtctaaacagcgtcatcaaatgcgtttggtaggccttttgcccggctgtaatctgtttttgatctaaatccaaaaagttattttgtaagaccgccattaaatcattgccaccgacggtcagtgtaatgatgtccgccttttttaaattcgcttgtagcgttggttgcgtgcgcacccttttttcaatctgaacactagtatcaccggtaacaccatagttttcggttgcaacaggatggcccgtttcagttttaattttagcagcaatccgcgaaacataaccttctttattttgctcatcaccaaccccgtgggtcaatgaatcgccgactgctactaaatgcagtgtttttttgactttctttggttgaacgactttcgttttctgaacactttcttgatgactacgtactttcattggacgtggtgtcaataactgccaaacgataaagacgacgagtaataccccggcaaatatccctaggtcgatcaacaattgtcgtatttttttcatatctggcatcctcatatctctttagataatagttaaggctgggacaaataaatgtcaaccagccttagtcataaacttcttagttttcagtataatacatcactgcaaaagcaccggcgcccgcatgggttgcaatgactggatcagtggttcgtactaaaatttcgattgctggaaaggctgcttgtaattgcgccttgatcttttcactgagttccaaaccatcggcgtgtgaaataccgattgctttaacattttttaactttctgagatcatcatccatttcatcaatgaacttcgtaatagtcttcataccgcgacctttacggagcaccttaagctcactatcagcaacttcaaggattactttgatgtttaataaacttgaaatcaccccggctgcatggcttaaacggccacctttaacaaggttggttaagtctgtgacacccatgtataatttcgtattgtcatgaactgcttgaatagctgctaaggcatcttctaatgaaccgcccgcttcaatcacttccgctgcttttaaaacttggaaggccattgcacgatctgtaaaatcactatcaataacagtgacgtcagctttagccatttcgccagcttgacgtgctgtatcaactgtcccgctaatcgcacgtaacatatgaattgatagaatttgactaccatcagctgctagttgttcgtatgtttcgataaaattaccaatggctggttgactcgtcttaggaagcgcactagcactagccatttcagtcataaattgatcacgtgtgattgtttcaccatcaatatagacggtattgtcaatcatgatggtcaacggaatcaccgtaatatgatgttgtttaatttcttctggtgttaattgaattgatgaatccgttacgattttaatattagccactactgcttcagccacactttctatctcgaaacaggcccatatgcggaccgctatttctatgattatatctataagacagtatatcaaactacgcccattttttcagcaaaagttactgagaaaaaaagcgactgtttatcctagcataaaaaaagataccctgcttaatcgaatcacagggtatcttgaggtgtttttatttagtgattctttgataaatctcaaaggtatgtgggtattgattacgttcatcaaccgttcctgcttgttgcgaaattaatttaaattgcgtgtagtcaattgttggcatataaacatcaccttggaacttgtcagcaatcttcgtaacgtataaatagtcgacattagccgcaaaaagtttaaaaatatcagcaccaccgataatgaataatttttgcatggggtgttctttttgataatcaagcagttgtgtacgctcattaaaaactaaaacgtctttagcaactgtcaaaccgctttggcgtgtaatcacaatgttttgacggccaggtaacggctttttaggtaagctgtcatacgttttgcgccccatgataactgcttcgttaatcgtttcgcgtttaaagttggctagatcattcggtaagcgccaaggtaaatgtccgtcttgaccgattaagccgttttgatcttcagcccataaaaatgctatcatctgctacctcctataccgcaacaggtgctttaattgcgggttctgattcataattttccactttaatatcagcaacatcaaaatcaaaaatgctcttcttatctgggtttaaccataatttgggtgcagcatgcattgatcgtgccaattgagtcttcacttgggtcacgtggttactataaatatgtgcatcccccagagtatggatgaattcaccgacctcaagcccagtttcatgagcaatcaaatgcgttaataacgcataactggcgatgttaaacggtacaccgaggaagacatccccacttcgttgataaagttgacacgaaagcttaccgtcgttgacgtaaaattggaacatggtgtgacaaggcggtaaagccatactaggcacatcttctggattccaagcagacacaatcaaccgtcgtgaatcgggattcgttttaatcatttcgatgacgtttttaatctgatcaatggtttcgcctgaacgtgtttgccaagcacgccattgcttaccataaatatcacctaattcgccgtattgttttgcaaatccttcgtcggctaagatccggtcgttaaataggcgcatttgttcttgataaacaactttgaaatcagcatcgtcttgagcccggtgactgaaatcggtcatgtcaggaccggtgtaatcagtacttttaacgaagcgttcaaatgcccattcatcccaaatatggttattatgttgtaataaataacgaatgttcgaatccccttttaaaaaccacaagagttcactcttgattaagccaaaaggcaccttcttcgtcgtcaataaagggaatccttcttgtaaattaaaacgcatttggtagccaaagaggctataggtaccggtattagtccgatctcccttgtagtgaccctcttctaagattgtccgtgctaaatcgaggtatacttgttctgacatggtaaactccctttttgatagttgtaataacgtgctagtgctcggaacataactgggctgaacacacttctcttctttaacgtgctttttgaaactgactcttacgcttaaccatatttgtcaaatcagcgattgcatcgctaatccgccaaatccagttaatgctcagagtcaaaccgtttcaaacgcacttctttagtctgcgtattcgcttaggtagtcccagcgcgccattttttcatctagttcttgatttaaacggtctaactcagcttgccattcggctaatttaccgtaatcagcaccattttgattcatctcagtcttgattgtttcgatttgttcatctagcttttcaagatctgtttcaatatgggcgtattccttttgttcgttatacgttaacttatgtttagcggctggttccttaaccgcttcgacagtgacttcaggtgtgggcttaggtgccgttacctttgtcgttgctgttttttgtttagccaagtagtcactaaacaagccgacttctgtcgtaatattgccgtgaccatcgagtactaataatttatcagcaacttgatctaggaaataacggtcatgggaaacggtaatgacggtcccgttaaagttttcgagatagttttcaagaatcgttaatgtcccgatatcaaggtcattagttggttcatccaataataaaacgtttggttgttgcatcaataattttaagagatacaaccggcgtttttcgccaccagataatttctcaattaacgtcccatgtgttgaccggtcaaagaggaactgctccaataattgcgtgacactaatccgatccccatttttaccgacaacttcttcaccggcttcttggaggtaagcaatcacccgtttatcaagatccaaatcttcattttgttgcgtataatagcccaagttaaccgtctcgccgacgaccaattcaccactatctagcggaattcgttcagctaaaacatttagtagtgaagacttaccagcaccgttcaccccagtaatcccaattcgatcattagcttgcactaacaagctgaaatctttcaagataggatgagcatcaagtgttaagttagcgtctttaagttccaagaccttcttgcctaaacgtgattggcccatttgaatatcaacttcggaagtatccggtccagttgtcagattgcccttcaaatcgttaaaccgattgattcgcgcttgttgctttgtcgttcgagctttagccccggcgcgcatccacgtcaattcttgcttatagagttgttgttgtttgtgggcggcttgttgttcgcgttcaatccggtctgctttttgtgttaagaattgttcgtagttcccggtatacgtatagagttgaccggcgtccaattcaaaaatttgattcgcaacccgatccaagaaataccgatcatgcgtcacgattaaaagtgcgcccttgtattgtgctaagcgtttttctaaccattcgatagaatcaaaatcaagatggttagtcggttcgtctaagattaataaatctgggctttcaatcaaggcttgtgccaaaccaacccgtttttgttggccccctgagagcgtattaatcggttgatctaagtcagttaaatgcaattgcgtcaagattgttttgatatcggtatccacagtccaagcatcttgttgcgtcatctgcgcatcagcttgttcatattgcgtttgcaacttaggattcgttggatcagccgtataggccgccaagacacgttcgtaattctgaatcgttttaaacaccggattttggccggcaaaaatagcggccatgatactcaaattagtatcaaagaccggtttttgtgctaaataactcattgcatattgattaggcgtttcaatctggccactatcataagagtcagtgcctgttaacgcgtttaataacgtcgtcttcccagtcccgttaatcccaacaaggccaattcgatcaccttcgcgaattaaaaatgaaatatctttaaagagcgttttttcgccataagtcttcgttaagttcgtcgctgttaatgtttgcaatatttttcaccttttactttcattctctcaatcatagcgaataatccggcgggtgacaattaaaaatcactaaaaaaaccgattcataatcgaatcggttttaatgcagtcattaaattttaggatattcgtcggcaattgagcttgtagcatcaatgacgatgtataaatgaccatttttttgtgagatttggctggtttgataaatgttatctaaaccgcttgtatccttattcttgaatgggaagtagatttgaagtggtttcttatcttgttcgtcttcaaagatgaggtctaacttctcgatatcttgatacttcgttgcgcgaccaaacatccccatttcaagtgagccagtattaatgtcttcactcttaacatgatcagcttctggtaagatttcagctttaaaactcttacatggatgaatttcttgcattgggccaccgttaattcggccatagctggttgttacccggctaatccaaatatcgttcaattccttgtggttgattgtccatgcgtcaccatttctaaaatacaatttcaattctttaaaaacgtgttgtgccatcaatgtcaccctttctgaatgtgcttacatgcttattttaacacaagtcttgaaaaagtggttcatttttatttagcggcctttagtaacgcttccgtcgtatttagtaactcgtctaggaccactttccgttctaaaatagctagtgttttgcctaaaatcggccctggttggaagccattttgcatcaatatttgaccattaatcgctaaatcggctttttgcttaatttgtaaccgatcatagcgttctaaccagtcagcagttggaattgtcgcagtcgtcaccaattgtgcgatttgcagactaatcactaagactgcttgaccagcttgataaaggtcccattggtcggcagttgccgtcaatagtttagggagtaagactaagccggctttaaccgcatcaatcacatcattagcactcttccaatgcttcaaaaagcgaccagcttgtgcaggggtttgcccgagtaaataggtcaccactaaccaaaccgcactttcatcatgcaactgttccgttggcaaggccgttaatcgttccaaagccagtaattgatctgccaaatctggacaataccgatataagcccgtgtcaataaacgtccgtaacccattttgccgttcaatcccttgcatcaacttcataaattcaacgtgaatgcgttcaatcgcaattttttcaagcaaggcagcgtgcttttcaatagcggcttgcgtggtttcagtcactgaaaaaccgagttggctctcaaaccgaactgcgcgcatcatccgaagtgcatcttcatggaaacgttcatcggcgacaccgaccgcacgaattttatgcgccttcaaatcagcaatgccgtcgaaaagatcgatgatttcaccatctgcgcgcatcgctaaggcgttaatggtaaagtcacgccgcttcaaatcctcttccaacgagcggacaaacgttactgaatcaggccgccggaaatcttgatacccggtttccgttctaaaagttgtcacttcgtagccattaccatggtctaagatcatgactgtgccatgttgaatcccggtatcgacggtccgcttaaaaatttgtttgatttcagctggataggcagatgtcgcaatatcaacatcatgaattggtaagcccaataaattatcacggacactccccccaacaaagtaagcctcaaaaccagctgcttcaatttgttctaggattggcagtgcttctgcaaattcgggcgcaaaagtcgttaatttcatttattcaacctcttatctaatcactattggtacatcattttatccatttatcataccacaatcctttgctaaacttaattggcttagtcatgacagcgattccgtgctatatttaatagtaggtaccacagtaagggggaatgacaaatgacacaaaaaacaaatttgaccaccactcttcgtgatttaatcgcgattgccattggttgtgcgatttacgcctttggtttgattacgattaacattcaaaatcatttagctgaaggcgggttaaccgggattaccttaattgtgcgctattggcttcatattgatccagcctatacgactttaattttaaatatcccattagtaattcttgggtacaaatttttaggtaaacgcgccttagcctatacaatttacggtaccgtcatgatgtccgtcttcttatggatttggcaacgagttcctgtcaccattaacttaaaccatgatatttttatcgccgcgctacttgctggtttgtgtggtggctttggtagtggtatcatctaccgctatggtggtacgacaggtggtagtgatgtgattgctaggattattgaaaaacggcgtggtattcaaatgggacgctccctattaatttttgatatttttgttttaacagcttctctcagttacctcgatatcgaacacatgatgtataccctaatcgcatcgtacgtgttctcccgcgtcgttaactttacactcgaagggacctatgctgccaaaggcttgttagtcgtcagtgatcactatcaaaagattgccgatcaaatcatgactcaaaccggtcggggcgtgactttcttacacgctgaaggtggttattcacaccaatcgcgtcaaatgatttattgtgtcgtcagtgctagcgaagtggcccacctcaaaagaattattgaacaccaagaccctaaagccttcatttcaattattgacgtccatgaagcactaggagaaggctttacgtatgagacaccaacgaaagattaaatagcatagacgaaaaaaggctgagcagataactgctcggccttttctgatttcttttttaaacaattgtcacgctttgttcttaataaccccaatttccttacttcgtaatatttaaatccaccgcttaatagaatgcgtttgctgtatccgaaatattccaaacacccagcagcacattatagccacttctgtcggttggaatattaatcgtctgtgcaacatctttggctggtaactttccttgatcatcaatcgaagtaatcttttcaaagtttaaaatacttagcggttgatttagattccaacctgggcgggttaagtaataatcccacgtacttgttttatgttgtgccgttaagtgccacttaatcgttaatgcgcctgatttaacttgattttaataccatctcgtactcgtttattcatcaagattcgaaaatgaactgatattagcactcgctaattttccatcgataaatgtattcttaggggcttcaatactttgtggctcgtattgaacttgaccaacattggtattcaatggtttttgaccggtatcatttgtgaacgcattactacctaaatacgctcgactacctggggatgtgatatacccgtgtgcgctaacttgtccggcacctaatgctgtcacacctaatactgaacaaaagccaacgatggtccatttcaataattgcttcttcatcatatccactccttatcatttatattacattttcatgttatcaagcccaggaaagcgttgccaaaatattgcgcttcattctttctgcctttttaaaatctgaaccgtttggacatcaaaaaagacccttcagttagataacactagccggcaaaaaagcgcgcttttctaacgggtttggcaatcggttctaataaaaagacaatcgtcatcgcagcgacaaacattaagattgctacgccataaaacggaaaacgccaagaaaaactccccagcgccccaccgactaacggaccaactgccattccgattcccattgaaccttcgtataacataatggcttgttccgttttttcaggcatcacactgacaattgccgttaacgctgtcgataagaacaatgcgtttccaaagccccaaccggcccgcaacgaaattaattgtgagattgtctgtgaacgacctgctaaagcggcaaataatacaataatgattaaaccgatactaattgttcttttggcaccaattctagtcgaaatgaaaccagtaaataacataataatccctgtcaccaacatataactcgtaaataatagcgtcgtttgcgctggtgttgcattcagtttaaccgcgatggtttttaaaatcggatcaactaagccaatccccataaaagcgaccatacacgtaaaagccaaggcatacgctgatcgcagccctttattttgattctccattaacatatcactctctttctctttatataaagtacactagattttaaaacgtatcaattttgacactaatttttgacatgaattaatgacatgtttgtgaaagaaaagtatgttatactgggcaataattaattgattaaagggtgaaacaagatgagtacactcagctatattttattatgtatgttagttcgtaaaccttgcagtggttatgagctaaagcagtatattaatttattttgggaagcacaccatagccaaatttatacagctttgaataaacttcatgaacaaggctacgtatcagtcgaaaccgatgccattcacaagcaaaaaaaaatttatcacttaacacctgaagggcaactcgtagttgctgactggttccaagaagaaacaaacgtccctactcaacgtgacgaatttttagctaaagtgtatgtcattgctttattcaaccaagaacaggccacctctttacttcaagatcgtcgtcaccattaccaaaaagcacaaaaacaataccaacataagatgcaagaatacgacgccattacagattcaatcgaaaaacagaagaatttgggccgctacctcatcttgaaacgccgcttaatggtttgtgccaccgaattagaatggtgcgattgggcacaggatatccttactctcaatcaaaacaaataaaagacagctgttgcaaaaagcaacagctgtctttttattctttggttagccaattcccatgataaacgcggaatacgttcacaatcgttagtaaacaaaacatgctacttgccatcaagaacggtccagccagcaaagctgacattgaaatgggcgcttggtgcaaaatggttcgcccgacatgaatcgtcaagccccaaactaagccccctgcaagtaggctcgctacaagactaacccctactaagattacgacgttcaattgttgtgtcagcaataactgttgttgcgttaaaccaagcaactgtaattggcgcatctgttggtcattatcctcctttgcgactaacatcgtcgccaacacatttgctaaaacaatcaacaaaggggcgcctaaatataaaccgattgtcaaaatgaaattcactaatcgctcattgttggcacttgtggtatttgtataggctggtatattccacataattgccgacatccctgttattaaaaccgcaatgattgtcactggcgtatacaacggtaaatattttttaacagcatagtcaatatcgtgagctgccaagtttaaaaagagcgttctagcacctagccaatagagacctcggctagctagttttaatactgtttgcccggtaagcgtaattagaatcagtagtaagaacaacacaagattcagattaccaacagaattaccgagaccgacaatcactttttcagactgcccaacgtaggttaacgtcataatttgcatcgccagtttaatgattaatccaatgacgaccattaacaaaacaatcatcttaattctacaaacgatccgccgccggtgactgggatgcttatttccatcctttagttgatggcgtgcatgccaaaaaccaccactaccagcaattagactagccaggataaccgttaacaaaagtgccatgaacgaaaaatgaatcgacatattcggcaacatttggggcccaacaatctgctgcaaccaaacataacaaaaacgcgttagcggcaaagcaatgactccgccaagtagagcacttaccccactaacaattccgatttgaatccccaaaatagcggctaatgcattgaccgtcgcacctagaatcgcaagcattcggtagtccgctttaaactgatccaaaagctggttcacgattcctttaatcacgattaacattgtgatgccaccaaaaactatgggcatgataaaaatagggagcggtgtattctgaccgtatagatcaacttgctgcgactccgccacattcacaattcccgttaaacaaaaaccgaggattaaaccaaccgttacaaaaaccggtattgttgctagccattgacgccaggaatgctttaactgtaaccaactggtcgtccacatctcttacaccaccttatccaaggctgcatagattgcctcaagtgacggttcaggcacaatttgttgaacctgaccgtcttttaacacaatcgcacgatctgtctgactggccaactcaatatcgtgggtcaccataatcaccgttttacctttggcaaccatctctttgaaatatgtaaaaataatcgatttggataccgaatctagcgcacccgttggttcatcagcaaacagcacatcacaatcagttagaatcgtgcgggcaatcgcgactttttgttgttcaccacctgataaggtctcaactgcaccatcgatttgacctgcaaagttcaattttgtcagtaattgttcaatctcagaacgtttcggttgctgatgactcagtcgttgctgtataacgatattttcaaacacaggaagtgactgaattaaattatattgttgaaagatgaagccaattatctgtctacgaaaagccgctaattgattaggtttcaattgatacggattaacccccgcaattgtcacggtgccgcttgttggcctcgtaatcccagaaatactgtataatagcgtactcttaccggatccagagggtcccacaatgctcaccaattctcctttttggaccttaaacgaaatatttttcaatatggttgtcgtttggtcagactgcccaattggtaccacctgtgttaactgatcaactgaaagtactgtatttatcattataaaatcctccccaaatgaattcgaattccctactcctcttcaatgtaacacttttatagagagattaaacgcgactaaagacgtaaaaaacgcccgactaaagtaatagtcggacgctttcaatcattattgcattgtttgataatcatcatagagggtctgcatatcaaggtcatttggcactaattgcaagtattgtttcaaagccgctaataactctgggatttgcgccatttcttggaagaataagattaagtcgtgtaagaattctggattatcctttaattccggataagcgagcaaataattctcacgtgcatcgtcgaatgcttcaatcgcaaattgtgattgtgccaatgaccaataaagttcagccgttggtttatgattggcaattgcttcttgcacaaagaccacgttttctgcatgacgattttgccggcgataaacttgactcaaggcactgatttcacccatattatctggattaatttctaaggccttgtttaacatttgttccgcaacttggtcgtcacctaattggagggctaaatcgctccccttttgatagaggacctcactatacatatcgtagccaattccggtttgaacggtcgtgagcgcttcttgaagctcattttgagcctcttgggctgtcgctaggtaaacgtaaagcgatgtatattgcggatcagctaattgaagcttcgtgagaatttcaattgctttttgataatccttgatttgtaagtacaagaagcccatttggaactgatcgtcttccgttaagaattcgacggtcattgtttcgtagatttggagtgcttcttcaaacgcaccgctgctggcataacttgttgccaagcgtttttgaatattaacttgacccaattccatcacatcttggtcaattaaggcttcatagtagttagccgccttaccgtattcacccatttcaaagtacaattcggcaagcgcaaactgcatcactggttcgtcgggataaaggcgcagcgccgtcaatagtttctgttcactgacttctggtaagcccatcgtttggtagacgtcagcggccgttaacaggctttctgcgtatgcattagattccggcgtaatatccgtcagtaagttgagtgcgtcgtcgtattggccgttgctgaccgcaatatcggccaacgtcgtccgaatttgatcttcatctggaaattgcgctaataattgttgatagattgtcgatgcttgttccaagaagcccattgcgtagagttcttcagccaaactgtacaacgtttctggatcgtcttcttttaaagccttttggaaaagctcatcggcttgttttaaatcgttatcttctaatgctgatagcatttgttctgaattcgtcatttaaccaccctttttcgatttatctattctaccataaaatgacttttaaccaatcaaaaagggctgggaaaatcccagccctctcatgaattcttatttaacagaatcctttaaagctttacctggcttgaatgcaggtactttgcttgcaggaatcttgatttctgcaccagtttgtgggttacggcccttacgagctgcacgttcacgtacttcgaatgtaccaaagccgattagttgaactttgtcaccttgtttcaaagtgtcttggattgaaccaaatactgcgtctactgcagcagttgcatctttcttagttaaaccagtctttgatgcaacgttttcgatcaattgtgctttgtttgccatgtttttcacctcctgctcatcacagataatcagtaataaataccgaaatcatttttgagtggtcaaaaatgacgaaacaatgagttgatcaccatttcatttttaaatttatcacacaaacctagtgatagcaaggattttcgctaaaaaaagggctttctttccaatttagttaatcatattagcttatcaacttcgaaatttgtttatttccgttgacgagggatcaaatgaattggtgtaccggtaaagtcaaacgttttgcgtagttgattcttcaagaaacgttggtatgagaaatgtaatagattaatgtcgttaacgaagacgacaaatgtcggtggttgaaccgccacttgtgtcatgtaataaattctcaaacgtttcccgttaatcgctggcgttggtgtgaccgttgtggcttccatcaagacgtcatttaataaggctgattgaattcgtctgttttggttttcactgactaattcgatcattgctggtaagttttgaagacgaacacccgtcttagctgaaacaaagatgattggtgcgtagtctaagtattggaattgattccgaatatggtcttcgaattccttcatcgtatggttatctttttcaagcgtatcccacttattaacgacgatgataatcccacgaccggcttcatgtgcgtagccagcaactttcttatcttgttcccgaataccttcttcagcattcaagacgactaatacgacgtctgaacggtcaatcgcacgtaaagcacgcataacagcgtacttttcagtattttcgtagaccttaccacgtttacgaatcccggcagtatcaatcattgtaaattcttgattattttccgccatgaacttcgtatcgatagcatcacgagttgtcccttcaatttgagaaacaatcacacgatcttcttttaacatcgcattcactaatgatgatttaccaacgttgggacgaccgattaaactaaatttaatactatcatcgtcttcttcttcaagatccgttggaaatttagcaacagcggcatctaataaatcaccgaccccttggccatgtgcaccagaaacgggaattggatcaccaaagcctaagctgtaaaaatcaaagatatcttgacgttgttctggattatcggctttattaacccctaataggattggtttgtcagcgcgataaagaatttgtgcaacacgttcatcagcatctgtcacaccttctctggcactcactaagaagataatcacgtctgcttcatcaattgcgatttctgcttgttgtttaatttgttccataaatggtgcatcactaatttcaatcccaccggtatcgattagactgaattcatgacctaaccattcacttgctgtataaatccggtcacgtgtaacacctggcatatcttcaacgattgagatccgttcgcccgcgatccggttaaaaattgttgatttaccgacgttcggccggccaacaattgcgataactggttttgacattgtattcattcccttcattgttcagtttaccttgtccatcaattgacgacaagcacgttctcgcgaaaaaagtccgcaaaataacacaaggacaaaaagtgctttaagcaaagcgaccccttgtcccgcgattagtctatttagcgactatcaggaaagggtctgggacaaaaacctagtttcgtcccagaccctaccttaagcctattaagcattcaatacgattttacaaactatttttcgtctaatgctttaccaagcatatcaccgatactaaagccagtttcttcttctggcatttcgtaatctgatggtgcaacgtcttcttgttcagaatccttagcacctgctggtttttcttgtaaagctttgattgataaacctaaacgttgttgttcaggatcaactgacaagactttcacttgaacagtttgtccttcttctaaaacatcgtttggtgttgcaatatgttgatgtgagatttgtgaaatatgcacaagaccttcaacaccagggaagacttcaacaaacgcaccaaaagtagttaaacgtttaacagtcccttccaatgtgctgccgacaggtgctttttcagcgatgtcatcccaaggaccaggttgtgtatctttaattgataatgaaatccggcctttttcttggtctaagctaagaatcttaactttcacgttttgaccaacttctaatacatcagaaggttggttaatgtgatcgtatgagatttctgaaacgtgaactaaaccatcaacgccgcctaagtcaacaaaggcaccgaagttagttaaacgtgcaacttcgccttcaacaatatcaccaggcaatagtttttcaaaaacggctttaagttgtgcttgacgttcttgttctactaatgctttacgtgataagattaagcggttttcgcttggttcaatttcaatgatttgtaattctaattcttgacccttaaagctattaagatcacgaacgaaacgatctgaaagcatagaagcaggtacaaagccacgtacgccagcatcaacaactaagccacctttgacaacgtttaaaactgttgctttaattgtttctttattttcaaatttttgttcgatttctgcccaaactttacgggcttctaaacggcgcttagataataagtagctaccattttccttgtcgttaccgattgtcgcaataacaactaaatcaaattgatcaccaactttgacagcgtccgttaatgtttcaattggttgacttgataattccttttgaggaacaacgccttcaacgccagttccttcaataccaacaatgacttgtcggtcttcaattactaaaacttcacccttaacaacgtccccaattttgacttcatggacactatctaaagcagctgccattgtttcactgctttgggtgtcattcaaattagcatcattcatagctaaaatcctccttaacgactatctatacatcctttattttagttgatatggcaatggattaccagtttttttatctgattaacccataaaattacatattttgtttcgcaatcgttaaaatttcagcaacaacttcatcaattaagagctttgtcgtgtcaatttcgattgcatcgtcagcttttctaagcggtgaaactgcccgtgtactgtctttttgatcacgtaattcgatttctgcttgtaacgttgctaatggggtcataatccctttagctgtattttcagcataacgccgtttagcacgttctttcgcactagccaccataaaaatcttaacttttgcatctggtaaaacagtcgtgccaatatcgcgaccatccatgacaacttgtccttgttcagcaatttggcgttgacgatcaaccatttctgttcgaactgctggtaatgctgaaacttgtgagacattattcgtaatttctggtgtccgaatcgctaaagtaatgtctaaaccatttaagaagactttttgaccagcttcatctggttggaactgaatatcagctttagttaattcagccatcaaaccggcttcatcaccataatcgaggcctagttgttgtgccaagacggttgctgaacggtacattgcacccgtatcaacataaacgaaccctaatttagtggcaacaatcttcgccacggtactcttaccagacgatgctggtccatcaattgcaatttgcatgtaaatcctcctaaaaaaatcattaaaaaaggctgggagaatccccaggccttctgtctagcattattatttaaccttgagtgcggttcctggtgcaacacttgaattagctgttaatcctggattcaatgctaataattcactcaatgacatgccgttgttggcagcagcacggtaaaggccttcaccttgtttaagggtataagtaccacccgctgtttcagatgaagataagctacttgacgcttcagcttgacttgaactagcagcagattctgaagcagcttgttgactagcactatcagcggcagcttgttgttcactagctgcttgttcactagctgcttgtgctttagcactttcgctagcagacttagcactagctgcctcactatcagccttcgccttactttcactggctgctttactttcagctgcttcttggctttcactggcttctttagcctttttagcagttgatttactcttactcttctcgctatcagcggttttgacgacaatcttagaatcttctaaaccggggcggttcgcacgactagaatgaacggtgtaagcgataattggaaatgcgatcattaaaactaataatacagctagaataatagcaaaatatgtatttcctttttccttactcttggcagcaacgcgggataaatttcctttgtcatcccgatcatcgtcgaactggctttcccagggtttttcttccgtcggattatcttgttttttcttatcatctttgagcattgacggccctccctattggtattctttgatattgtaccacagacttttctaaaaaactttaaatttatctaaaataattggtccaagattcccgtccaaccagtcagaacaacggtttcagcggttttataattaatagcctgttctaagtctaattgtgctaaaaagtcggtcgaatcctgttccccgcaacacgtttcgctgtgttcaatcgtctttggtgcctggtcaaaatagttcacaataaattgacgccggcagcccttgagcgtcaaataatccaacattgtttgtaatgaaaattgtttttcagtttggcgattatccaataaggcagtcacctcttcttcggtcatccccagttgttggtaacgacgcaacagttcaaattcactgccttgactttgtttaaataattgcggttcctgataatagcgccgaatgagtccgggttccggaatcccaaatgatacgagtgattgttgtaaatataaatcttgcggggttgttaggactaaagcatacgctgcttgcccatctcgacctgctcgtccaatttcttgtagataactttcgatattttgtggcaagtgataatgaatcacaaagcgaatatccgctttgttaatccccatcccaaaagcattggtggtacaaattaaatcgagttgtccttgcataaattgttgttgaattaaataccgctcctgggttgataacgctgcgtggtaataagcaatttttagatcagtctcctgttgtaaaaaggttgcaatcgccattgtcttttgccgacttgaaaaataaacaatcccgggaccctggctttttttcactaagttggctaaaaattggttcttcgcttgttcatcaggttgttggctcacgcccaaatagatattggggcgatcaacagaggtcatgatttgggccgcgttttttaacgccaacttattcaaaatatcttggcgtacacgatcattggcagtcgccgtcaaagccagtgttgcagttggctgtaattgggccttaatggctgctaaaactaaatagtccggtctaaagtcaattccccactgtgaaatacaatgggcctcatcaaccacaaacaaatcgatttgacaacgttgaagcgcctgaatcacttctggttgactgatagtctccggtgccataaaaataaagcggtaatccgctaaatgcgtcagtaactggtatttttgctgaggcactaaattagaattaatggcgacagctcgtttttccccttgataattcaattgggcgacctgatcttgcattaatgcgattagtggcgagacaatcacagtcgtatgccccaagatataggccggtaattgataacacagcgatttcccggtcccagttggtaaaacggctaatgtctcctgcccagcaagtaccgacttaataaccgctaactggcccggtttaaaggttgaatagccaaagtgctgcgctaactggtcataaatgagttgttcagaagtcatgcggccaccaccttcgttttaatttgatataaccgataactgaaaaaatccagtgtcggtaattgctcgtgagcaacgttaaacgttaaatccggcatctcagtcatcaaagccgccaaagcggtctctaaatctgaactaataaaccgctcaaacgggaactgcggctgcaggattgccgtttctaaaatgtgttccctaatcgtgcctaacttaacccggcgtttttggctaatcatttcaatggactgtccttgttgcagcagtgtccaggtttgtgccgtgcttaaactcaaggttgaatccagtggtgacaataaacacgctaataacggatagtcggttgtgtgctggctgaggatggcaaaaaaatgggcttgcgcatctaacagccgaatcgttacggtcagtggttctaaggttagtttttgcgccaattgctgttgactctgcccaattatttgatggccaactaggcgattcgctaataaatcagcctgaacaggtgttaactgcgttaagatctgttgtaattcttgtttaaactgagtgaccatctctgaatcttgtttatgctgtttaaaccaactgacaacttgcacacgatcacgcatgctagtttcaattggaaaatagtgtgtgttatggtgactatattccgacataatttgaatcgccaaaaacaagcggctttgaaactgctgtaaatgacccatttctgggccataataatgcgttggccactccaaagtcgtcatcaatgtagccttttgagccgcaccagtcggtgtcaaccaagcttgccgatcttcaaccattaaccaacctttttcttgtagttgtgttaattcagcttgaaattgggctaattctagattaggataaatctgaagccactttaataaaccatacgctaaaccagcatacaggttggatgtggtacgcttaccgaccaatgtataataaatggcttggtagcggcggggtgccgtcgcaaataaacagagtaaatagtctgttaacatcttaataattcctctaatctagaaagtgtgaaaataatgctctatagtaaagttatcccagaacgctgtattgcgtgcgggttatgccagttaaaggcgcctgaactcttcgactacgatcacgaaggggttgctttttttaaaccggacaataatgccggccaaactcccatcgaaaatccgcatgatctaatcgcttttaaagccgcttataccgcttgtccgacccgcgcaatcgtccgtcaagaggagccattttcatcgtagcatattcagacaaataatacacgttttgtcgctaaactaataaaagcctaccgctattttgcggtaggcttttatatttagattgctgttttcatatgttgttttaaccatggtagaattctgagatataaaactgcaaagacgactgtgaccaacgcacccttaatcaaattaaaaggtactagtccgataaagacgtatttagtcatcgacattcccaaattaaagttcaatagtttaatatacatcggtaagatgaataaccagttggctaagcacatcacgattgtcatactgatcgaactgactgttccggcaatcacttgcccccacagcacactcttttggcggttaaagagataataaaatggcaatagataaaaaatagatgccatcacaccggcaaaatcgccaactaaactaggtaagctagcaccagtcatgatgaaatggagtaacgaacgaattaccgcgactccgattccgccgattggtccgtagataaaggttcccaacaagacaatcacatcactgaaatctatcttcagaaatggaaaagccaaaataatgggaaactcgaaaaacatgacaataaatgagattgcccctaacatggcgaccccgaccattgtccgtacttttgaaacacgcattgcaaacaccctccgtatgaggttgccttcgtcagcggacccgctgagtcgattgtacctaaaaaggcctgctaatcagggtgattaacagaccttagttgaatacgttcatactcaaataagccctatcttcttccatctagactttcactatcggtactgggatcacaccagttcagccaccacaagaatcaacattgcagcaggtcgcggacttttaccgccggtcgggaattacaccctgcccctgaagacgaaccataatattttattacgcaataagcatagcaaaccaatgtgcgaaaagcaactaattagtcatgtcgtgacaattttggtctgtttttatgctttggtttttcatttaattcagcgatctttttgaattctgcaacttcgattggtttcaaagcacggtattcgccagaaactaaaccatctaacgttaagaagccgtatgtttcccgttttaacttagaaacgggtaagccaacagcagctaacatattcttaacttgatgattcatcccttcatgaatcgtaatacttaaaatagccgtattcttgcgacgatccgttgaaatgattttcactttagcaggggccgtcttacgtttttcaagcataatccccttccgtaattgacggagcatttctgcagttggtaaacctgatactttcgcaacataggtcttatcaaccttgtattttggatgcatcatcatgttggcgaagtcaccgtcattggttaatagtaataaacctgatgtatcgtaatcaagacgtccaattgggtaaacgcgttcttgaatatcttcaaggtattctgtgaccacgcggcgctttttatcatccgtgacagctgaaatcacttggcgcggtttataaagggcataataaacctttttttcacgcgttaatggcacaccatccacttcgatatgcgcagaagtactatcaaccttaatccccatttccttaaccactttaccgtttaaagtaacgtgaccagtcgcaattagcgtttcagccttccgtcgtgaggcaacccccgcatttgcgatgactttttgtagtcgttccatagttattgttctcctttaggggccgtctctggtcccgtttcatttaatgtctgttcaaactgacgatagtataaatccgcagaatcattatccgattctgccgtatcgtccgttaatgtcatttgttctagttctggtaattcttttaacgagcctaagccaaagtaatctaagaaataatcgctcgtcccatataaaatcggccgaccaggtgcatctttacgccctttttcaacgattaattgtctggcaagtagcgtttgaattgccccactactttgcacaccgcgcacttcatcaatttcaattcgagtgagtggttgccgataaacgatgatcgccaatacttcaagtgctgcttggctaatactcgtcgaaacgggaccatcaaaataggccttcaataaacccgcgtaggccttcttagtcactaatttataacaatcagccgcttgaatcaggttaagaccagattgttcatcttcctgataacgttttgctaatttcgttagtaactgtcgtactgcagcctcgtctaacataatgagtcgcgcgatatgttgcaacgtaatgccttcatcgccggcaacatagagtaaactttcaatttcagcgagatggttcatctgcaataccttctttcaatgtcactaatatctgttcatcataacctgcttggtcacaattaatcagccgttctttcatcaattctaagacggccaaaaaggtcgttacgatttcttcacgatcaaaacggttgataaccaactgttcaaaagtcgttgttgctcgtgtttttaagcaatcgataatccaatccatcttttcagcaatcgtaatttcatcattttgaaccgtcttaaaatcggtctgttgaacagttgcttcaaccaacattttagacacagcagcagctagatcacgcggcttaattacaccacgcgccagtgggaccactttttcagcaggattagcacttgccggtttcgcaaataataattgtctttctgattctcgttcttgtaagaccgtcgcaattttttgaaaagcttggtatgccaataattggtccaccaattcctgacgaggatcaacatagtcttcctctaaggtttcagccattgccggtggtgctggtaagagcaacttactcttgattttcatcaaggtcgccgccattactaaataatcacccgcaatatctaacttcaattcttgcatctggtgcaagtagtctagatattgcgtggtgatttcagcaattggaatattataaatatcaattttagtctgattaatcaaatgtaataatagatctaatggtccttcaaaatccgtcaaaattaacgttaattgttcagtcatgcgttacattaatccatttctttagtctgctgttgctcccatttagcaattaaaggcgctgtatccaatgatcccatgacacggttatcaggataaagtgctgccagttcattcaagatccggaatagattagtatcagttctttcagcgggacttagtgacatatgacgcaccaaaataaaatcagtgccaatctcgacccctacgacgccggcgaagtcgccctcatcattttgccaaaggtataagacgtgttgatcgtcttgattgtaaaaagcaagttctgactgtacatgacttacttcttttaaatctggaataaacgataaaaagcccatcgcaattttttcataatcattcttgtacttaaataacatgttgacctccaatgatcaaacaaagttctgttagcaatactctaccataaattagaaaacacgacaaatcaacctaatcacgcggatgacttctctgataaacttccgtgagatgtttcttactgatatgcgtataaatttgggtggttgaaatatcagaatggcccaataactcctgcacaattcgcaagtcagcaccattttcaagcaaaacagtcgcaaaagaatgccgcaatgtatgtggtgtcacatctttatcaattcctgcggcctggacaatggcttttaaattcttccaaatgccttgtcttgttaacccgtttccgtgaaaattgacgaacaaataaggtgaatccttgcccttggttaaccgattgcggctacgttctagatattgattaatccagtccaccgcaacatcgccgatcggaataatccgctccttatctcccttacctagggtctgaattaaccccagagataaatgcaaatccgtcaatttcagatgaaccagttcactaacccgcaaaccagtcgcatacaagacttcaaggattgcccggtcacgaaggcctaatggtgtactcgtgtccggtgtctttaacaaacgttcaatctcttctgatgataaaacagccggcagatgccggccttgcttcggggaatcaatctgcagcatcgggtctttttgaatacgtccctcacgcgctaaatattgatagaatttacgcaatgtcgaaatactacgcgtgatactgctttgcgccttttgggccgtcgtttgggcctgtaagaaacccaaaacaataaatcggtcttccgtaaaagacgtcaatttttgtgacactaaaaactgctgatactgtttcaaatcttgccggtaactctgacgcgtattttcagaaaggccgcgttcaatcttcagataatgtaaataatcttgaattagatcatccaaacaaacccctcctacaattggctaatatccacttgcttacttggatctagctgattggccggtaacccattagccgaattggcagcttgacagttggcacaaatcccctgaagggttaagcggtgatctaagacagcaaatgagaaccgctcagcaaccgtctgttcgacgcttaccaataagtcttcatgaatttcttcgatggccccacattgtaagcataacaaatgatggtggaaatgctgactggcattttcttcgcataaatcataatgcgtcacgccatcttccacaaagctaatcttattcagaacgtgtaactcagttaacatctctagtgttcggtaaaccgtcgctaagccaatctctggcacttcggctttagtcttgataaagatttgctcggcacttaaatgcgcctgtgagcattctaaaatgaccgcaacggttgcttctcgttgggcagtcaatttataacccgcttcttgcaattgttttctgatttgttctaactgctcagccttactcatcaatagagacttcctttttttaataaatcacggcattactgtcattaatttaaattaatcttggtcttgatcgttatcaacaattggttcgatatctttttggcccttagccgttaaaattgtttcgccttcttcttgcacgatgaaaccattcttcattaaccggcctaaagcacgcttgaaactgcccttactaatcccaaaataactcttaattaattctggattactacggtcagtatatggcattgcgtagcctggttgccgttttaagacggccataatcatttcggcatcatcaccgatttcttcataggctctaggttttaaactaacatttaaactaccttctggacgcacaccgatgacccggcctttaacccgttggccaagacgtggttctgcttcacgttctgaggggtgaataaagccaatgtagaaatcatctgttaataagaaagtccctgccatcttcaaacgataaacggtcccttcaatatcttggttcttcatttcttgtttagcacccttagaaatagctctaaagatattttcgtcggctaattggccccacatccgacctttttgatcaacttcgattgcaatcatcaagcgatcgccaaccttaggccataatttcatgatagttggtaacacatcaagcgaaaccacaatatccttatcaggtaagccgatattaacaaaaacaccgagatcacgacgtgtttcaacgacttcaccaaaagcaaagtgaccgacacgtgatttaggaataaccgttgataaaactaattcccggcttgaattttcatatgcaaaaccggtaactgttgccccgattgctaattcttcttctaaatggtctttctttaattcaaacgttacgccgtctttttgggcgaagtacgcttcttcattttcatctgttacaagtgctgtaatcacttgtccgattaattcgttcatagttaacctctttattcttcttaatggattggtactaaattgaaaattgttaaaatggtgtaggtgataccggcggcaatcactggtccagccgcgattcccttaaggaaaacgacgcccataattgtgccaaatacaagcgccactgtcatttcgggactagcggctaacaagccaacaccctttgcagacaaaacagcgactaacacgccacacccaacggcaataaaacctgccggtgtcttaaaagcactgattaattctttaaaaccgatttgaccagtcgcaattggtactaagatggccacagaaatgaccgtcacgccccaattaatccctttagcctggataaccggcaatactttttcagaaattggtaatgcctttaagactaaaacaactgcggtggcaatgattaaagattgattttttgctaataaggcaacgattaaaatcgctgctaaaaataaccaactttccatgtgaacctccaataaagtctccctatcattgtaccgataattaggcgacttgtcagtattttcataaaagtaatttcagaaaacaaaattttcaaatcaaaaagcgacttgcgcacaaaaaaacaccctcaaattttgagggtgttttctttcttaatcagcgtatgattaaagagcgtttgttgcaccgcggtaaacaataccacgacgtgaatcaacagtaacaacttcgccatctttgatagcttctgttgcgtctttagcaccaacaacaactgggatacccatagcgataccaacaacagcagcgtgtgatgttaaaccaccgttttcaacaacgatagcacttgatttttcgattgctggtaagtaatctttgtcagttgctttaacaactaagataccaccatcaacagctttttcagctgcttctttagcatttgaagcaacaacagccttgccaacgattgtttcatcgccaacaccttggccttgtgttaattttgaaccaattaattggatcttcataacgtttgttgtgccacgttcgccaacaggaacaccagcagtgatcaagattaggtcgccttctttagcaaaaccatgttcttgagctgtttgtgtagccaagttgaacatatcatctgtattagcaggtttcttagccataactgggtatacaccatagttaactgttaaaccacgacgtgtacgttcgtcaaatgtaacagccaagatatcagcttgtggacggtatttagaaatcatacgtgctgtagaacctgattctgtagcagcaacgattgtcttgatacctaagttacgtgcagtatgtgcaacagcttggccaattgattctgtcaagttagtcttgctgtatgctttcaatgcatatgcatcgcgatctgttaatgatttttctgttctttcatcaatgcgggccattgttgcaacagcttctactgggtagtcaccgttagcactttcacctgaaagcattgttgcgtcagtaccatcaataacagcgttagcaacgtcattaacttcagcacgtgtaggacgtgggttttcttgcattgagtccaacatttgtgtagctgtgataactggtttgccaatagcattacatttcttgatcaagttcttttgtacgaaaggaacgttttcaaatggaatttcaacacccatgtcaccacgagcaatcattaaaccgtctgaaactttcatgatatcgtcaatgttgtcgataccttcttgtgattcaatcttagggaagatttgaacatgttccatgtgtttttcttctaataattcacggatatctaaaacatcttgaggtttacgaacaaaacttgcagcgataaagttgatatcgttgtctaaaccaaaacggatgtcactagcatctttttctgtgataccaggtaagttgattgaaacaccaggtgcgttaacacctttacgtgagccaaccataccatcgttttgaacttcagtaacaagttctttgtttgcttcgtctttttcaataatcttaagatccactaaaccatcatcgattaaaacgtggccaccaacgtgagtatcgtcgtatagacctgggtaagtaacggcaattttttcaggtgttccttcaagagtatcgtccattgaaatacgtaccacttcaccagtgtgtaattcaaatttcttaccttgttgaacagttgtccggatttcagcacctttagtatctaacatgataccaacagttttgcccgtagctttttcagcttcgcgaaccatattcatacggcttaaatgttcttcatgatcaccatgagagaagttaaagcggaatacgttagcacctgcttcaattaattttgtgatgatttcaacactgttacttgcgggtccaagtgtacttacgattttggttttcttcataagtggaatctctccttttatgtctgtttttttaaaagactttacagtcattttaacgaattttgggtagaactataaaatactagtaagctaaatcttcatttaaatcataaagatctaacattgcgtgatgcttgtgattgaataagtctaacatatcatgtgcgataatttcattcttttcaatcccaagtgcaaccccgcctttgccttcaagcaataattcaactgcttttgagcctaagcggctagctaatacacgatcactagctgttggtgaaccaccacgaacaacgtgtcctaaaacagttgaacgtaagtggaaatcgccgtattcagaaagtttttctgagaattcatcggcatgcataacgccttcagccaaaacaataatagcatgtttttggccatgttcgcgtgaagcacgtagcttttcagcaacggccttaacgtcgaaatcacgttctggaataataatgtcttgtgcgccaccggctacaccagcccataaagcgatgtcgccagcgccacggcccattacttccacaacgaaagttctttcatgacttgcagccgtatcgcggatacggtcaattgattcaagaactgtgttaacagctgtatcaaagccaattgtttgatctgtaaatggaatatcgttatcaattgttcctggaagaccaattgcgttataaccatgttcagtcaaacgaagagcaccgtgataagaaccgtcaccaccgataacaactaaagcttcgataccgaacttgttgagttgttcaatacccttcaattgtccttcgacttgtgcaaattctggataacgtgctgagtataagaatgtaccaccacgttgaatcttgtctccaaccgtaattggatccatcttgaagatatcaccagcaactaagccagcgtaaccataattgataccatagacttcaaggccttcatgcattgcttttcttgcaacggcacggacggcagcgttcataccaggtgcatccccaccacttgtcaaaatacctatgcgtttcatcttttcaccccaggcaaatattttacttaaaaaaccgatttggtctttcaaagtcactaatatattatcacttttctgaaaagaagtcttgtcttttcagaagtttttaacaaacttattttcaaaactaaactaactaaagccctttaaaataacgtttgtaggccccagtaaggttgtaagcgccgtcgttaatttttcatcgttcgcaatccaatagcgttcgttcaaaagaattgacttcttcgttgctgaattatagagaattaccgggattggccctcgacttttttcgagtagttggtacattttttgttgctgttcacgcgttaaatccgcagatagtcgtaaataaagcgtggccttaggcaaccctttttgcgcttgttccgctaacataatctgattaccgataagttgcaactcttggcgttgttccgtctttcctatgactaaaatcacttgttctttggtcagccaatctgctacttgccgataaaccgatgcaaacagcgtaacactaatctcgccggtggcatcttgtcccgtcacaaaagccatttgctcgccttttttcgttcgaatcaccttaattcggcggacaaataagactagtcggacattttgattgggtgctaagtcactaacttccggcacgtgatagtaccgacggacacgttcatacttttctaccggatgccctgaaagataagcccccaggtactccgcttctttgtccaagcgctccgttaacgtcaaattagacaccgttttttctttgggtgctagaatttcgaataacgacatattatcgccagctaacttaacactatccaataaatcatcgagattcatcaaaagtgcgttgcgattgggattaaattgatcaaaggccccactgtaaatcaacgccactagcgcctcttttttgagatacttcgcgtctagtcgttgtagaaactgtaacacagatttgaacggaccacccgtttggcgctcatccaaaattgccgctacaaaatcccgtcgtaaacccttgatactgtataacccaaaaataatcccggcatctgtcaccttaaaataacgctgactgagattaatatcgggtggtaagactgataattgtcgcttctttgcttccgctaaatacgttttagtttttgttccttgatttaagacggcatttaaaaccgctgcgaaaaaggcttctggttgatgaacttttaaataagccaaccaaaaggcaattttactgtaagcgaccgcgtgcgaccggttaaaaccatagttggcaaactgttcgatatagtcgtagaccgttgtcgcggcttgctcggtatgacctaaagccagcgcgccttcgataaacttggttcgactcgcatcaatcactgcttttttcttcttactcattgcccgccgtaagatatcggcttcccctaaggtaaaaccgcccatcttagaagccgcctgcatgacttgttcttgatacaccaagataccataagttggttgcaaaatctcagccaacgaatcatccggataggtcaccggcactttgccacttttacgatcgatgaaggtatcaatattttccattggccccggtcgatacaacgcatcggttgcgacaatatcttcaaaagaagtcggcttcaagcgccgtaaaacatttttaatccctgttgattcgaactgaaagatgccgtttgtatcgccttgttgaaataacgctagcgttgctgggtcatctaacggaatattttgcggattaaaaggctgacctgtttgttggctgactaatttaacaatattcgctaaaatccctaagtttcttagacccaggaagtcaatcttcaacaatcctagttcttcaacattgcccattggtagttgggttaactcaatttcatcgccaccgctttgcagcgcaacggtttccgttaatggcgcttggctcaacacaattcccgccgcatgggttgaataatggcgtggtaagccctcaattcgctgcgccgtttcaaatagtaagcgattttgttgagaatctgctacgaggttcttaaaagcttgcgactgatcgtaagcttcttggagcgtaatttttaaaacgtttggaatcgccttagaccaagcactcatttcaaactgactgaggccaaagacccgaccgacgtcctttaacgccatcttagcggccaaggtcccaaacgtaatgatttgggccatgtgattttgcccatatttttgataaacataatctaacacttcatcccgacggttatccgggatatccaaatcaatatccggcatattggcccggttaggatttaagaaccgttcaaacagtaattgataccgaatcggatcaacatctgtaatccgtagcgcatatgccactagcgcaccggcagccgacccacgccctggacctgtcataatattttgttggtgggcgtattgcatcacatcggcgacaatgagaaaataatcggcaaaacccatctcgttgatgacctgtaactcgtagtctaatcgtgtctggtaagtttctggaataggctgtgtcttaaaacgcgcttgcaagcccgcttgactctgttgctttaaataagtggcggctgattgccccgctggtgtctcaaattgggggagctgggcccgtttgaacgataaatccacctgacattgagccgcaattttttgcgtattagcgacggcttctgccagttgtaacgcttcaaaggcggccgttgcctgctgcacatcttctaaaaagtagccacctggcgcttgcggtgtttggagattaacctgcgtacccgctttaatatgttgcaggacttgaaccgcaaatgcatcttccggttctaaataccgcacgtcccctaaagcaactagcggtactgccgtttgctggcttaattgtcccagaggcactcgctgtcggctagcggcttgtttagcactaatccctagataaagactatctgcatcgacaaccgcctttaatcgctcaatataggtctgtgctgccgttgcatcgttttgcattaacaagcgtactaactcgccatcttgactcggcgtgataaccaccaactgctgtaatagtgattgaaccgcctcaaatgggactaattctgattgcgtcataattttcgttgaaatttttaaaatattttgataacccgttaaatttttggccagtaaaatcaacggaaaccgttcgtcagtctgtataagtccgccaacttcaattgtgatccccaatagcggcttaatatcggctgctttggcagccttataaaaatcaactaacccatagacaacgttcttatccgttaacgctaaactctgatagccacgcgctttggcggctgttactaaatccgtaattttagtggtactttctaagagcgtataggtactcttaacctggagttgcacaaatgccaagaacgccccttctttctgatgacagattctaataattccagtataacaaattatttcaaatgaatctcgttgtaaaacgtgttacaatatcatagaattgcatgaaagaaagaaggtcaatcatgaaatacgttatgacgcttttttggacgctaatcttcggattcgttgtcggcttcatcggttctaagttagttaaattggactttaatgttcaagcaacgttgactgtctcagtcatctttgggattttactcaacctagtaccccttgttttacctaaagacccagcagcataagacaaaaaggacgactcaacgaaaatgttgggtcgtccttttttttgctttattttgtaatgtagatgtataaatgacttgcagaaaagccggtattaaacttaacgccatttgaagtaatggtcttcattgtcgtttggttgctcttcttattcttcttcgtaaacttactaaattcagacatgaccttcttagaatccgcacctgttgattgagcgagtaacgcaaaactcgttccgaattccttcaaagccgctttatctttaagcgctttaattggtgcgattaaagtaagtcccatcacatcttgatcagcaattgcccctcggatcacaacgttatcagttttcaccaattgatgaacgccgtcagctggttttgctggtaataattgatcctttttagccgttttagcttgttgcatagctgcttgaacatctttttgcgtttgttggagtgccattaattgggctggtgccaattgaccggctttggctgctgccgcttgtttttgtaagctttgcgctttggcttggtctgcctttgataacgccatgccaataacagcttgattatacttgtcggcaatcgcttggtattgaccaacagcggtgcctgctgccaccgtaactttcttttcaatcgtctttgagcccgttttagcctttaacgtgaccgtttgttgtttggttgttgttggtacttgaacaacgtatgtgccttctctaacgcttgttttatgcgttgcgccttggtcaatttgatagcttaagtgcgcctttttattagtggtacctttgacaactgcgaccatcccattttgatggtaatttgttttagaagtcgttaactttgcttggccacagcccgctagtaaactaactaatcccaaactcacgactaatccaactactgtttttttcatttttcgtcaccttttcatagaaattatcgttaatgagcttttagcgtaacccttttagaacaacatttcaagtcaaaacgacgacgtgtcacaaatatttccgccatccaaaaaggccaccgcagatccggtgacctttattaatctttttattttaagcctgttttcttttcgtaacgattgaacataatcaatgcgacaactgtaaagaagactggaccggcaattgaccagaatgtttggccaaggttaccgtcgattgcaggttgaataattgtgaagacgttggcgaacccaactgtgaacattaccatccaaacacagaatttgtagaaggttttacccttataaatcgtgaatggcttttcgatactgttatccttcttaaaaccaaagaaggcaaaggcaacgaataagtatggtaatgtcattgaaacgtttgtcatggctgttaaaatttcgaagaacttagcagcgctcttaccaccaaaggcaacaaaagcgataattacaattacaatcgcagcttgcacgatcatcgcgttaactggcatgttatgtttgttcttcttagcgaatgacttaggccataattcagctggtgtgccttcgataatcgtcttaagaggtgagaaaatcaatgtaaagaatgcaccagtaagtgcaaggaacattgaaagacccatataacgacttaaccaaatcccaacttgaattgcagcgtgatgactcatatgaagcgcaagccctaattggtaacccatgttattcatcgcaatgtaagcaacgttccctaaagtaacttcggcatttgagccagttactttagcaaaaccgccgcctgttttgaagacgaaatcccagttagtaaatgtccccatcatgaagatcccgatggcataaccaattgcaatcacgattgctgaaattgctaaccctttagggaagttgactttagcattttctgtttcatcaactaacccaccaacaacttccaaaccaccatatgcgaagattgcaaatacaacgaaactaaagacctgaatcattgatgtataactttcgttaggtgattggaaaaaggccttagccgtgattggttgtgctgtaacacccttttttaggatcaggattaataacccacctaagaataagatcacattaatcaatgtgatggctgaaccaccgatgcttgttacttttttgactttatcaagccctttggatgtgacaaaagtaatcacaataatccaaataatagcaagaattcctaatgtttgcacaccattggttagcccaaagaatgtccaactttgcgtcttatcaactccgaaaatagcatttgataatggaatccaaatcccgttcccaacgttaaccatccaaatgatgtatgacgcaaaccacatgaaagtcccaataaaggcaaatttagcattgacggatttttccatccaagaataaatcccacccttagcttcaccaaaggcagcgcccatttccccaagcataaatgcgtaaggaataaagaaggttacagctgctaaaacataccaaaaaattgatgcatatcccattaagaagaacgctcgtggaatatttgtaaaaccaaagactgacgtgaaaatcatgagaataagtgcccctaaagtcaacttactcgtctttttcttttctgccaccccaaacacctctttcaaatagtttaatggtctaagaataatagccatttgcctaatattgttcattattaaattaataacaaactaactagtcatcttcattttacggtgcaaactggtttaggtaaacgctctatttcgttttctaatctaattattttgttttttaaccaaaaattaataatcttttcaattacttattttttatcagccgattttaacgttgtcgtttgatcctttttaacggtaatccgaatcgcaatcttataaaccacactctgacaagctaacttcaataatgttttttgggtttcagtcactaagccgttagcaggtttggtcccttgttcaaatggactgtattcttcgtccaattgatgaatcgcatctaagaacgtcaaaataaaataatcatagagttgcttttcgttacgatcagtcgctgttcccactgacagtaagcggccaatttcttcaattgaaaaattagtctttaataacgcaataatcaagacttgtgagatttgttgtttagcatagcgcttcttgtccggcgcaacgactaaccccttcttcacgtaattattgatcatcgcagcagtgatttcatctagatccaatacttctaaatattgattgatatagctgacgacttggtccatatataaattcaaacctggtaaatctgtccagcgaggtaattgtaatagttgtagttgatttaagtctcgttttaatagctcattattcataataatcagcctccttatatttaattacaattatatcatcatctagtttcaaaaaccataataaggcataaaaaaagagcttcccgaaggaacctcttaactaagactagtcgttagcttttggtgtaacaacttgttcgcctttgtagaaaccttttggtgaaacacggtgacttacacggtattcgccattagttgcatcgaattgtacgtttggtgtgttcaatttgatatgtccacgacgcatacgtttcttcgtctttgatgttcttcttgctggaactgccattattttcagactcctttatatcttagattcattaatgatataccgaactcagggaacttagcaaggattaaatcaatctttgctaaattgatttaaaatcaattagacgtcccactacttttgtccgcgacttctataatactatgtttacgtaacaagagcaagttatttcataaaaaacaatctactcaaggcattcaatcaaaacaaaattcgagattgaaactcatcatttcaacctcgaattcatgtttaatcttatttttaataaacacaaagtcaatcactgattacacgtaattgtataatacaaatcttgataaatcaatcataatccgactattttgaaaaagcttcttgcaaaaattagtcagttgctttgttttcaaatactaattgattgtcttttagaccaatttcaactgttgtgttaggtaaaacgtttccggcaataatttctttggccaacggtgtttcaatccgatttgtaatataacgccgtaatggtcgtgccccaaacgctggatcataaccttctttagcgacccataacttagcgtcttcagaaatcgtcaatgtgatttcttgatctgctaaacgatgtgataaatcagccaacattttaactacaatttgttcgacatcttgcaagctcaatggcgtaaacataatcgtatcatcaattcggttcaagaattccggcttaaatttcgtttgaattaaggtttgaacgctattagctgcttcttttgaaatttgaccttgatcatcaacaccgtccaagaggatttcagaacccaggttagaggtcatgatgataattgtgttcttaaagtcgattgtacgcccttgtgagtcggtcaaacgaccatcatctaagacttgtaaaaggatattgaagacatctggatgggccttttcaatttcatctaacaagacaattgtatatggattacgacgaacagcttccgttaattgaccgccttcttcataaccgacataaccaggtgccgcaccaacaagtcgcgatactgagtatttctccatgtattcactcatatcgattcggaccatgtgtcgctcagaatcgaagaggtcttcagctaaagccttagctaattccgttttaccaaccccagtagggcctaagaacaagaatgagcctaaaggtctattagggtcttgcaagccagcacgcgctcttaaaacggcatctgtgaccgcatcaacagcttggtcttgaccaattacccgttcgtgtaaatgatcagctaattgtaatagtttttgccgatcacctgctactaatttagcgactggaatcccagtttgcgaactaacaactgtcgcaatttcgttttcggtaactgattcttgaaccatccaatcctctggtttttcagccttttcaaggtcagcaagatcttgttccaattgcggaatggtggcgtgttgcaatttagcagctgtttccaaatcgtagttactttgggcatcttctaattgccgttttgcctggtctaattcttcctttttgtcgttaatcttgttcaaatcagctttttcggtttcccaacgcatcttcaaactattcgtcgtttcccgtaaatcagctaattgtttttgcgtttcggctaatcgtttttgtgaagccgcatccgtttcattcttcaatgccgcttcttcaatttccaattgcattaattgccgcgttgcttgatcgagctcagtgggttgcgaattcatttcaacgttgatattagcactcgcttcatcgactaaatcgattgccttatcaggtaagaagcgatctgtgatgtagcggttagataacgttgcagccgccactagggcattatcatggatacgaacaccgtggaaaatttcgaaacgttcctttaacccccgcaaaatactaatcgtatcttcaacggttggttcttgaattaacactttttggaatcgtctttcgagggctttatctttttcaatgttttgacgatattcgtcaagcgttgtcgcgccaatcatgtgtaattcgccacgcgctaacatcggtttcaaaagattaccggcgtccatgctgccttcagtcttcccagcaccaacgattgtgtgaatttcgtcgatgaaaactaaaatccgaccttcactcttcttaacttcttttaagaccgcctttagtcgttcttcaaactcaccacgatatttagcacccgcaattaagctccccatatcaagtgagacgatggttttatcctttaagttatcaggcacatcttttctaacgattcgttgggctaagccttcaacaatcgctgttttaccaacaccgggttcgccgattaaaactgggttattcttggtctttctagaaagaatccggatgacgtttctaatttcttcatcccgaccaatgacgggatccatcttaccttcacgaacagctttcactaaatcagtgccgtatttttcaagcgcttggtagttatcttcttggtttttagatgtcacacgctcgcctcctcttaatttggtaataatatcttttaattgtttagtcgtgacgttatttttttgtaaaaattgtactaacggattgtatttagacttcatcaaccctaaaataaccgtttcagttgataaaaattcatcttgaaactcttgcatgtaagtttgagccgcgttcaaaacttgatagagattttgtgaaatattttgaccatagtttgtttgaccttcaactgttggaatcgtatcaatctcgcgatcaatttcactttcaagtgcggttaaatcaattcccgcttcctgatagatttgccgacccagttgttggggttgaattaaatatttaaataaatgtgggacatcgatttctgtttgatgacgcgtttttgcaatattttgtgcttctgcaattgcatcttgaacagcttgtgtcatttgttctggattcataaacgtcattcctttttaggtttattttttgaattaaacgtcaatactgattgactaattctatgatagtcaaaataggtcaaacattcaagactaatgctcaaagataggacttaagtctaataaaaaagaggcacccaccaaaataaattcggttagtgcctcttatttaaattaaacttcttttgattgcattaattgcttcattttggcattcatttcgtgtaattcagcctctttatcagccaataatttatcatacgttgctttttgcttaacttgttctgcttcaactgcggctttgatttttgcttcttgaccttgttctaaatctgctttttctttagtccattgcttttgcgccttacgttggctcaatgaactcccagttgcggctaagaatgtgataatcgcaccgattaaaagcgacacaacgatcacgataatcaagggccaatcaaccgttgtaaagccaaaattaatggcaactggattaacattcaaaacggcaaaaaccaccacgattagtgcgagaattaaaattgtaattaaacgaccttgctttttcatcatacaacctcctatttcttattaaacaaattaccagcgacgtagtcaccaatatggggtgccaattgataaaattgggcgcctagtgacatcaaccacggtgcattaatttcgcgcttaggatgcccaatagcccccacaatcttgtgtgcgagttgatctggatcaagcacgatccagttaaccgatttaagatagttaccagtttgatcagcaatatcaaaaaaggcggtatcaatcggtcctggattaacagttgtcacttgaacaccaaatggtttcaattcaagccgcaatccgtttgagtagcctacaatggcaaacttagtcgctgaatagattgctgatttaggtgtcgccatcttaccggccattgaggcaatgttaatgatgtgcccacgttgtttttcgatcatctgtgatccaatggcccgcgtcaaatacatcaagcctaaaacgttcactctaaacatctgttccaccaaaggcatcggtgttgctagcgcttcttcaaaatgaccaaacccagcagcattcactaaaacatccggtatccccacttctgttgttaattgcgcaacaactgcttcaatcgcttctggggcactgacatctaattgataagcataagctgcttggcctgagagccgttgacattcgtcacgaaccgcttctagagctgcttgacgccgtgctaaaacgacgacaatggcacctttgctagctgcttcataggcaattgcccggcctaaacctgacgaaccccctgtaaccaccacaatcttttgttttaagtcttgtaatgctgctaaattttgcattttaattactccttccgaccatgaaatggaatatcatacaaatctaaatcgctaacgacacgcgtatttttgaaaatatcgcgggcatcattttgtaattcacgcacagcttggcctaaataacgggctgaaatatgcgtgagtaataggcgtttgacatgtgctgttttggcaaccttggctgcattgatattagttgaatggtagtattgacgcgcaattttttgttcttgcttgccaaatgtactttcatggactaaaacatcggcgttttcggctaggcgcgtaatcgcttcacaattgcgggtatcgccaataatggtcacaatccgtcctttttgtgcgttaccgatgtagttacgaccgtcaatttcgcggccatcactcaatgtgactgtttcaccatttttaatccgggcataaacgggacctgaagggacaccgtcagcttgtagtttttcaacctgtaattcaccaggatgatctttttcaacaattctaaaaccgtaacttgcaatccggtgatccaattttgcacattcgacccggaatgttttgtcatcaataatgacaccattttctggtaatacaacgaacttcaaggcatacgttaagtgactttcggaaagttttaaactcgtccgaacgtattcttctgttcctttggggccataaatcgtcaacggttcgtcgccaccttgaaatgaacggcttgataagaagcccggtaacccgaataaatgatcaccatgcaaatgcgttaaaaagattttcttaactttccgtggttttaacgttgttttaagaatttggtgttgcgttgcttcaccaacgtcgaataaccacacttcattccgttcatccaataattttaatgcaatactcgtgacgttacgttgacgggcaggaacacccgcaccagtaccaagaaattctaattccatctaactcttccattctatattaaatttaaatcaattactgcttaactaacgcttttgtaacgatcgccgcatattctttcacaccaatcggattaggatgcacttggtcatcatagaaccagtcaccgtgttttcttgcttgatcgtaccaattaataatcgttagatttggatactccttagcggctcctttaagcatttgattaacatcattttgccaaggccgcgttggcacgtatgcatttagccaaaagactttacgttgactaccaatggcagccataaattcatctaactgcgcttgggtaaatgagccgttggttcccaaactaattagaaccgtatcgctaagcgcgcctttttgggcgtagctatcaacaactggcgtactcttgttcaattggcgaccgacagaggcatccaccaacatattagggaacagtgtttgcaacgttttaccagcatcgagcaatacagaatccccaattgctgtaattggcatcgattgggctttttgcaattcaacctgtgttaacccgtacttctcatattcttggttaactgggtgtttttgagccgctgcttcggcctctttatcagcttgtgcttttgatttagcctttttctgttgcttattttgagccttggccttttcaactaaggctttattacgagcatcattttcttttttgttcttttgaatattaaccgcaagtgccgatttatgagcatccggcgctggttgccccggtgcttgaatcgcacctacaaggcccactaaaaagacaattgccatcccaaaaactaaaccggattgccgatttaacgttgggtgtttaacaaattgacgcattctctgccctaattcttgatatggataatgggccaatggttgttcaataaagcgatatgacaattcagttagtccgaaaataatcgcgacttcgatcactgggtataaagccggatgtgcagcaacatttttaaagacgccctcaaagaaaatcatcactggaaattgatacaaataaatcccataactgcgttttcctaaccagttaaagactggattggttaataggcgattccaatctgaacctggatgtgcaacaactgctaccaagacacagattagtaaactaaagatgaataagccaccccgataaacaaaggcactttctgcattcattttgaccattaagatcaacattgtaatggtgctcaaaagaccaatgccatctaaggtccatcgttggcgcggaataatcttttgtttcaaagctgtcgatggccagacaaaagctaaagcagcccccaccaagattgagaacatccgagtatctgtcccatagtaaagccgacttggatccgcatttggatgatatagaatggccatccagattgccgaaactaaaccagcacctaataaaacacgggcaatccggcctttattcttaaagccaataattaatgcgacaacgacaaacggccataacagataaaattgaccttcaatcgaaagcgtccataaatgtgtaaagggtgattcattattagcaaaccgatcaaaataagattgaccatggccaatttgccaccaattataaacatacaaaatattagtgataataatttgatttaagttatgcaacatctgccgttcaaataaagtaatatacgcacctgtcgcaaacaacatcgtcaataaacccggatagagtcgcttaacacgtcgtaaataaaaactcttcaaattaatccaatgattttgttcccattcttggaccagtaaatccgtaatcaaatagcccgaaaccaccatgaaaatcggaacgcctagataaccacctgtaaaagtgtacggcatcaaatgatacaaaataactccgataaccccaatagcccgtaatccgtcaaacccagtaatataacgactgttatttaagcgctttttccctgccattttctcaacctactctatattctaatataaaacattatagcaatgtttcccaccactgcctacttgaagctcttttttatattgatgctatagaaaaaggaagaatccagagtcgaatttcttcctttttgaaccctattattcgacaaattcaaacgtaaagttatcaattgccactaaatcgccatcatgagcgcctttttcacgtaatgcttcgtcaagtcccatagaacgtaattgacgggcaaaacgcatcacaccatcttgatgatctaagttactcatcttgaagagacgttcaaccttttcacctgtgatgtagaacgtaccgtcttcatcttgttcgacgttaaaggctggtccttctggttgatattgataaagtttttgtgtttgtgcttcttcaacatcacccattgggaattctgctgtttcagctaataaatcggctgtcttgttcatcaatggttgaacaccttgatgcgtaatacttgaaatttcgaaaatctcatgtgtatcaccagccgctgctaatttttgtttgaattcagctaataattcggctgagcctggtagatccatcttagttgccacaatcacttgtggacgttccaagatttttggatcatatgattctaattcatgattaatttgttggtaatcttcatatggatcacgaccagtttgatcgtccatttcgattaaatgtaaaacaactcgtgtccgttcaacgtgacgtaagaattgaatccctaaaccaacaccatctgaggcaccttcgattaaccctggtagatcggctaatacgaaatcacggccatcatccagttgaaccatccctaagttaggcaccaatgttgtaaattggtagctcgcaatcttaggtttagcacttgtgacaacagaaagtaatgttgatttcccaacagatgggaagccaactaacccaacatcagctaagactttcaattcgagttgaatgctacgttcctggcctggttcgccgttttcagcaatttcaggggcactattcttagcggttgcgaaatgcatgttgccacggccaccacgaccgccctttgcaatcactaattcttgaccatcttccgttaaatcgcctagcaattcatttgtgtcggcatcacggacagttgtaccaggtggcacttggacaaatgtatcttcggcaccgcggccatacatttgtttattctgaccgttaccaccactattggctttaaagtgatgacggtagcggaagtccattaatgtccgtagaccttcatctacgactagaatgacactaccaccacgaccaccatcgccaccggctggtccgccaagtggcacaaacttttcacgacgaaatgcaacagcaccatcgccgcctttaccagctttcacatcaattttgacttgatctacaaacattattttgactccttctcgtttctaaacagtaccttatatactacctaaatttaggctaaaagtaaacagacaacgtcataatcaatcataaagtcttctaattaatgatttttaagtaaaaaaagaagacgcattaatcatcgtcttcagtataacgcttattgtgcattcgggattaatttaaatgagctccaaggttttaaatattttaataagaataattcatctggtgcaatatggcccacaacgtttacccgaccatcatttggcattgcttgaagcgcaatttgggtttcgcctttgtattggccgtagccaacattgtcaatcaagatatcgccccgttttatatcaactgtattgtgggctgcaaatggtaagtctttataaatgacccgcgtcattgttgaacgcaggatgtattcagaacggtcaccacgataactgtgtaagctttcaaataataccttgcgttcatcagccgtaatatcctcagccacatcaatcataatcgctgggaattctgcattaaagaccgtttgcattgtttttagttccgcttcggaagcatacgcattgccaacaatgatgtcatcgatattatccattaacatgtaatgtttcatttgggtcgccatcgctaagtcccgatcaacttccatcgttggtaggccatcttgtgttggccaaggtccgaaagtcgcttcatgtgaattaacgaaagcagccgtatttaaattatactgtgcaaattgcgctgtacattggttaaagaagtcttcccctaaaccggaataacgatgtggatagaagttatggcagcccaataagttagcccgtttaggtgaaaaactcataatattgtcaacatagcttgtcccttgactcatattaatttcgattttaagatcgtatggattacgggtcatcttcgcttcttcttggcctgtaaacccgttatctaaccgaattccccaagcacctaattcatggaagaaacttaaatcatcataggaaataccaagttgttcaaacaaaccaggattaatgtcaatcatcacttgcatccctaattgatttgcataatcaaccacgcgcttgaaattagtaagcaccgcatcttgatcaccactgacttctaataatgatgtgaagactcgtttaaacccgtattgatgtgcaaggtctagataagccgcatccttttcaaaagttgatcgttctggataaattgaaacgcctaattttcccatgtctattacctcctaaaaattgggctataccgccctaacatcttttagtttatcatagatgactcatcaatgaaaacctttacacaattataaattcagttctctttaaattcatttgattgtttttgaacgtttttgaaatattttggttgctttttattgtaaacgatgacataatgaatgcacggaggtttttgatatgttaacagaagaacggcaccaagccatcctggatttattacaacaacaagatgtcgtcaaaatgaaagcgttatgccgcttattagacgcatcagaatccactattcgtcgtgaccttcaacttttggaagaacaaggattggtcactcgaattcatggcggtgctaaacgcctcaataaattacaggttgaattagggcaaatcgaaaaaacgagcaaaaacgttcacgaaaaaaatgaaattgctaagtttacagcttctaagattcaattagggtgcgtcatctatctggatgccggcacaacaactcaagcaatcatcccttatttaacacctgaaatgaatttaaccgttgtaactaacggtgttgatacagcttcacttttagctgatcatcatattcaaacctacctattaggtggccgggttaaaaataagaccaaagcgatggtcggtgcgggcgccttagaaacactgctccaatttcaatttaaccaagcgattttaggaactaacggtgttgaccaatattcaggtttaacaacgcccgatcctgaagaagcaacgctcaagcgattcgcgattcaacaggctaaccaaacgatggtcctagctgatcatacaaaatttgatgccgtttcatttagtaaatttgccgaacttacgcaagttcaactgattaccgatcaactctcccctgcactacgtcaaacttatcaaacacatacagatttacaggaggttttatagtgatttatacgattacggcgaatccatcaatcgattacgtcatccaacttgaaaaactaaatacaggtaacgtcaaccgcgttcaatctgacgtgaagctacctggtggtaaagggattaatgtttcaagaatccttgctgaattagcactccctagtgttgcgctgggttttgtcggtggcttcaccggtcaattcatccaaaacaaactcaataatgcatctattgactgtcgcttcacagaagttgaagaagatacacggattaacgtcaagttaaaagatagcgttgaagaaactgaaatcaacggccaaggccctcacatttcagctggtactgttgataacttgaagcaacaactggctaaattagaagccggcgatatcgtcttcatgtcaggcagtttgccacctaacttacctgctagcttctataaagacttgattccaatgattcaagcgcacaatgctgaattcgtaattgatacaactggtcaagccttattagatactttagctgaaaagccattggtgattaaacccaaccaccatgaactagctgaattattcgacacacaatttgctaaccaaggtgaaatcatcgctgccggacgcaaattattagacaaaggtgcccaacacgtactggtgtcaatggccggtgatggcgccctcttaattacaccagaccacgcttatctcggtggcacccctaaagggactgtgattaattccgttggtgctggtgattcaatgattgccggctttgtcgggacattcgcgcaacatcacgatgcactagctgctttcaaaacaagtcttgcttgtggcagtgccacagccttttcagaagatttagcgactagcgctaagattaacgaactcttaccacaaattgaaatcacacaagttgattaattttaaatacaaaggagatttattatgaacatccaagatttactcttaaaagatgcgatgatcatggatttacaagcaacgactaaagaagccgctgttgatgaaatggttgcccgctacaaagatatcggtgttatcacagatgataccctttatcgtaaagatattttggctcgtgaagcccaatcatcaactgggattggcgaaggcattgctatgcctcatgccaaggatagcgctgttcaacgcgcaactgttttattcgctaagagtcaaaatggtgttgaatatgacgcattagacggccaacccgtttacttgttcttcatgattgctgctccagaaggcgctaacgatacgcatttacaagccctagctggtctttcatcacttttaatcaacccacaattagtggctgatttgaaactagcccaaacacctgaagatgttcaagaactctttgctaaggcccaagcagccaaagatgctgaagacgctaaggaagaagcagaagaagctgctaaagcacaagccgctgctgcaacacctgctgatgaacaaaaaccatttatcgttgctgttacagcttgcccaactgggattgctcacacttacatggccgaagctgctttgaaagaaacagctgctaaaatgggcatcgatatcaaagttgaaacaaatggttctgaaggggttaaacaccaattaacagccgatgatatcagccgtgcaacaggtgtcattatcgctgctgataagaaagtcgatatgcctcgtttcaacggcaaacatctcttgaaccgccctgttatcgacggtatcaaaaaacctgccgaattgatccaaaaaacattggatgaagaaggttcaatcttccatgcaacagaatcacaagcaagcgaagaagcttcagctgataagaaaacactttggagccgtatctaccaagatttaatgaatggtgtttcaaatatgttaccattcgttgtcggtggtgggattttaatggccatctcattcctattggaacaaacagttggcgctcattcaacaacctttattttcttgaactcattaggtaataatgcttttaacttcttaattccagttcttgctgcttacatcgcgatttcaatcggtgaccgccccgctttaatgcctgggtttgtcggcgggtatatggccagtcaagcaacagctagtgtgatttcttctgatagtcctgccggtttccttggtggtttagctgctgggttcatcgctggttgggtcatcgttggtttgaagaaagtcttcaagaacttaccacaaacattagatgggttaaaaccaatcctgattttccctgttcttggtctattgattgttggctttatcatgttctttatggtcaacccagtcttcgctcaaattaatctctggttaagcacattcttaacgcacttaggggctggcaatgccttattgcttggtgcgattttaggcggtatgatgtccgttgatatgggtggtcctttcaataaggccgcttataccttcgcaatcggtgtcttcacaaccactaaagatggctcattaatggccgctgttatggctggtgggatggtgccaccattggcaatcgcggttgctgcaacaatcttcaaaaacaaatttacgggtagtgaacggaaacaagcctttgctaactacgtcttagggatttcattcattactgaaggtgctattccatttgctgcaacagatccattgcacgttatcgtttcaagtgtcattggttcagcaatcggtggtggtttaacccaattatggcaaatcactgttccggcacctcatggtgggattttcgtagccccacttgctaaccacggtttactctttgtccttgctgtattaatcgggacattcatcagcgctttgatcttaggcctctggcgtccagttgctaaagaatcttaatttaaaaaaagtcgcagtcaaatgactgcgactttttatttgccattaaaactagcgctttttaatggctatttagttgaaactttttaaaatgtgcccggagataacttaacgttaagctttcagtctgtgaagcgaccaattcagatggcgttccactggccatcacttggccaccttggctgccgccttttgggcctaaatcaattaaataatcagcattcgtcatcaaatcaaggtcgtgggtaatcataatcaccgttgcgcctttggcttttaattgattaataacgcccatcaaggtttccacatcccgtggatgcaaaccaacagatggttcatcgaagacgaataacgtcccggcccgttttttattcaaatgcgtcactagctttagccgttgcgcttcgccacctgaaagactcggggtactttcaccaaggtgcaaataacctaagccgatctctttgagaatcttcagttctttcaagatgttgggcacatccgcaaaaaccggtatggcttcttctactgataaggccaataaatccacgatgctatcaccatgccacttaattacctcaattgccggcttataccgtttaccctgacattctggacaaacttcttccatatctggtaagtattgaatatccaaaataatactgcccagaccaccacaattgggacaggcaccttctttattgttatacgaaaaatgggcaatcccataattgtgggcttgtgactccggtagcccagcaaataattttcgaagattcgtcatgatgttagtataagtcgctaaagttgaacgcgtatttttaccaactggcttagcatcaatgctgacgactgacgttaaatcggtcgtcaactgggtcacctgttggggaagttgctcatgcttatggtgagcctcaatcgccggtaccagactatccaagattaaactggtcttaccggcccccgagaaaccagaaaccgccgtaatttgattattcggtatttcaatggtcacatcacgcagattaaaatactgtccaactgtcattgtcgttcgaacacccgtagcttgcgttgcaactttggggtacaaaatattgggtcgaccggcaatgtatggtccaattaatgattgtgggtcttgcactaaatcggccggcttgccttgtgcaatcacctgaccgcctttgcgccctgccgccggaccaatttcaatcacccagtctgcttggctaatgatgttgacttcatgatcaacgaccactaatgaattgccctgcgccactaactgtctgaaaatatgaattaaaccttcaacgttatccggatgcaacccgattgacggttcatccaagacatacaaaacaccggttgttgccgttcttaaggtccgcgctaattgaattcgctgaagttcgccagtcgataatgtgttcccattccgtgacaacgttaaatagtcgagtcctaatgacagtaatggctgcaacgtttctaataagttcttaaacaaaatggttgccatttgttgcatctcgtctggtaaatcggctttagtagccgttacccaagtgtctaatgcccctagcgtcatatcagaaactgccgcaatattttgcccgccaacggtttgcgttagtagttcgggattgagccgtgtcccgtgacatgttggacaagttgaaaaatgaaaaaaagaattgaccttggccatcgcacgatcacttttgaccgattttaaagattcataaacggcgtcgtaggcattttcatagagtgtattttccgtactaaagacgcgaccggttgatgtgtgaaaatcgaccgcgtatttattccgcttaccatgcaagacgatttctttttccttggccgtcaaatttttatacggcacatcaattcgaaccccgatatgtgcggcgaccgttggcataaagttccgccccggtaaacgccaagaagcgattgcgccgtcttcaatactgagattttcatccgcaattattttgcgatcatctagcgtttgaatttggcccgtcccatgacattccggacaggcacccgctgaattaaaagcaaagtcctcagctgatttagccataaattctacctgacaagttggacaggtaataacgcccattttatcgccagctaaatccatcgcttgcgcaatctgcaaactaggttgaatcttatgcccgttcggacaacgcgtggtgcctaaacgtgaaaaaattaaccgcacaacattaaaaatttcactcatcgaccccactgtcgaccgttctgaaggaacactggggcgttgtcgtaatgcaattgccgatggaatatgccggacttcttgcacttgcgagcgtttattctgtgtaatacgccgccgtgtgtaagtcgagagtgcctctaaataacgtcgcgagccctccgcgtataaaatgcccatcgccaatgaacttttacccgatcctgagggccccgaaatcgccacaaattggttcaaaggaatatcgacattaatattttttaagttattgacgttaccgccccgcacttcaatctgtgttggttgtttaactgtcatgattaaccttcttcttttttagattgacggtccacaatgtctgaccaatcatttttatagtaactgttttaattgttccgcttgcacactacggacttcttctacaacaaccaacgccttaacatcgatttgtgagacaaccggtaccaaagtggcgagttgtttagccgtacaaatgacatacaacatcggccgctcattttggctgtaatagccttgggccttaataattgtaatcccttgttgaaactgcgtcgataacgtttcagcaatcgtttcgtattgatctgaaataatcgttaccgcgcgtttagccccaaatttagccagtagtttattcaaaacaactgctgataaatagagttcaataatcgttaagagcatattttgaaaaccaatgatcaagcccgacggaatggcgacaattaaatcgaaaaagagcatcgcagacccattcgggattcctaaatagcggttaacaatcttcgccagaatcgtactaccggcaattgtcccttggcaatgaataataattgccattgcaatccccatcaagacgccaccaatcaccgttggaattaaggtttgtgtcgtatggtagccgataaaatgcggtagcttcaaaaagagtgaaatccagattaccgcccaaactgaataccaaatcgtttgacgctcaaggtatctaaagccaattaccactaataggccgtttagaactagattcgtaaaagccggcggaatcgcaagtgcataatacccaatcgcggtgagtccggtcacaccaccctcaccgatttgatggggaatcaaaaaatcgttaatggcgatggcataaataaaggccccaatgataatacccagtccgttttttaaaattacttttttctgcatttgtgtcacttcccgttccaaattagaataagcgtatcatacattgggggctagataaaagagtcattttagagcaacttgaaaccgccaaaaaacgccacaaggattgccctgtgacgttcaccaatctttatttaataatacctaaatcgatcatcgattgaccggttgcaataatcgaatctgctgccgatctttgttgccaacctaaaagctttttagctttttcattacttgtatcggcgtatttacccactaaagtcgctaacattcgtaaatccggtttgaatgtcgctgctagcttaataacactattgggaattgtcttttgcggtaaccgacttgcgtattgtgggaaagcatcacgtaagacatcggccacttctaacatagataatgtttcaccagtggttgctaagaagcgttcgccatctgcttgtggcgcagtcatcgctaataggtgtaagctcgcaacatcgcggacatcgacgtaccctgattttacttgtggcacagccttaacttggccatttaacagttgttcaacttgcacgtttgaatgcgaataaacggatgataaaacagggcccataacaccaaccgggttgacagctgctagtgataagccttgcccttcagttttaatgaagttccaggccgcctgttcagctaacgtttttgatttttgataaggatgaatatttttagcacttaaatctgaccagtcggcttcagtgtaaggcgtttgttgattaggatgccccgcacagattgccccatatgcagaggttaacacgacgcgcttaacattcgcatcgcgagcggcttttaaaaccattaagacaccattcactgccggattaatcatttcagattcatccttgaaatttaatttaggcgttggtgaggccacatgcatgacgtaactgaccccaaccatcgcagccggccattgctctggatgttgcaagtcggcttttacgatcgataaatcttcaatattggtaatcccgtttgcttgcatgctggtgacaatccgttggctcttggccattgaacgcaccgttgtccgaacggcgtagccctgttctaataattgtaaaataatatgtgatgcaataaaaccactaccaccagttactaatactaattctttcatcttcaattcctcgctttcgttacacttgtaacatctatggctttatattaaaataaaagacgttcacaaacaagcgattcatcagcatctgtgacagaaaggcaaaattgttatggcagcaactaaccatgcccaagcaatcaaacaagattcccaagaatacctcactaccgcattattacaactcctagaggcccatcaatttgaagatattacggtcacccaagtcgtgaaacgtgccggtgtcagtcgaatggctttttaccgcaactttgattcactcgaacaggtcttaatcgattattttacaccaattatcgaaacacacttcaaggccgtcttacagcaacaatccgcggaacttaagttagcggccctctcgacattttttatcgaattagaagcgactctgaaactggcggacaaacgcggtttcgaaccgatcgtccgcgacgtcttcacggacaatattcagcagttttatcaaacaattgacccctggcggtcactggatgcgattcggcaaaaatattacgtgcaattcatggcggttggtgtctaccaaatttggcgtgattggttactaggcggacaaaaagaatccttatcatttattcatcaactattagcaaatttacaacatcatatggacctggctgttagccaacccattagcggattaaaaaaacgttaggctagacaataatttgtctgacctaacgtttttttatagtgataatttaatggtttgcgcaactgtcttcgatattccgagtgcttcaagttcttcaacagacgcatctttaatatgcttcatcgagccaaaattcttcaagagtttcgtccgcgttttcggaccaacccccttgatatcatctaacttagaactcaacgaattcttaccacgtaactggcggtgaaaactaatcgcaaagcgatggacttcatcttgaattcgcgtcaataagtaaaagccctgactcttaggatcaagctgaatcgtttgatcggcttcaccaaataataacgaagctgttttatggtgattatccttaaccatccccgcaactggaattgtgagccctagttcgttttctaagacgtctttggcggcattgagttcaactaccccaccatccattaaaattaagtcaggcagcgctttgccctcttttagcaagcgtgaataacggcgatagatcacctcgcgcgtattggcatcttcgttggcgccggcgcgctctgccgtctgggttaatttatacttccgataaagcttcttctcagcgcggccatcaacaaatgtgaccatcgccgacaccggatcggtcccttgaatatgcgaatgatcgaatgcttcgataacatgaccatggggtaagccgagtgcatccataatttcatcttgcgcaccaaccgtcttgcgattatcgagttccaataagcggaacttttcttctaataccagacggctatttttttgcgccatttccatcaaggcttttttctctccccgttgtggcgttcgaattggtacttgcaaaatatcggataagacttgcttttcgatcccatctggcacgagaatttcccgtggtaacacattattcttacggttataccactggagaataaaggtcgccaattcttcttccggcgtattcacacatgggaagagacgtttttcccgccgaattaaacgtgcttggcgaataaagaagatttgaatcgacaaccagcctttatccatgtaaaaggcaaataaatcacgcggtgtatgatcgttagaaataatcttttgtttttcaacggttgcttcaatatagcgtaattgatcacgcaactcagcggcccgctcaaattgcatctcctgggcagccgtcgccattttctccgttaaatccttcttaacattgtcgacttgcccatttaaaaagcgtttaattttcttaatctgttcggtataggctgcttctggtacttcttggaagcaagcccccaagcactgccccatatgatagtacaaacaaggacgtccttgatgaccctgacagcgccgcaaggggtaaacacgttgcaagaagcgtaaagtctcctgagccgcataaacgtccggatacgggccaaaataatagccaccatcttttttgacatcgccagtaatcaataagcgcggatcacgttcattggtgatcttgatgtacggatagcccgtcccccgttttaacttgatattaaagtagggttggtgcttttggattaacgtaatttccaacaaaaaggcctctttatttgtcgatgtaatgattgtttcaaaatcgacaatttcagagaccaatttggccgtcttaccttcgtggctactcttaaaatacgagcggacccggttcttaagattcttggccttccccacgtagataatctgtgcgttaatatctttcatcaaataacagcctggtaaggctggtaataaggctaatttatgttcgatatgttcacttgccaaaaacaccactcctttaacccaaaacaagtgttcgttcctatattttacgtgtttttggctaaaatgcaactatcgacaattattgcgctaaaattttgtctaggaattgttgggtccgttcttcttgcggatgttcgaaaagttgcgttggtatccctttttcaacgatttggctatctgccatgaaccaaacttcatcagctacttcccgtgcaaagcccatttcatgcgtaacaaccaccattgtcatgccttcttgtgccaaatcttgcatcaccttcaacactccacccaccatttctggatcgagcgctgaggttggttcatcaaataataagacatctggtgacatcgcaagtgctctagcaatagcaatccgttgcttttgaccacctgacagttggtcactataagcatcggacttatcggctaatccaacccgttctaacaactgttgtgctttttttgttgcttcttcttttgattgacgtttgaccttttgtggtgcgagtcttaggttatctaaaaccgttaagttagggaatagattgaagttttgaaaaaccatccccatcttagtccgcatttggtccaattgcttttcagagagactcatcaagtcggtcccctcaaaaagaatttgaccactcgttggttcttctaaccggttcaagcaccgtaataaggtactcttcccaccacctgaaggtccgatgaccacgatcacttgaccagcttcaacatcaccactaaccccgttcaaaacaaggttatcgtcatattttttaactaattgattaattttaagcatgttgcatcttcctttcaatatggttgagtagtttcgaaagactaaaggttaagataaagtagatgaccattgcgacaaagattggtgcaacccctttgtaggttgctgattgaaccacttttaattggtaaatcaaatccgtcacaccgataattgaaacgattgaactttccttgattaatgagataaattcgttgcctaaggctggccagatgttcttcaaagcttgtggtaagatgatataccgcattgtatcgtgttgtgagagccccaaacttcttgaagcttccgtttgaccagcgtcaatcgcgttgatccctgaacgaataatttctgcgacgtacgcagcactgttaagcgaaacggcaattacaccagcgaataaggctggaatattaacccataacccaatcccgaaatagacaaacatgatttgaatcatcaatggtgtgccccggacgaattcaatatacatgactgctaggctatggaatagtttattcttagaaagtcttgcaaaggcgagtacaaccccaatgaagatcccgataatgattgaaataattgtaatgaataaggtataaccaatccctttagcgaaataagaccagtagtgccacatacttgtattgtgcgtgttcgttttcatcaaactacccgcactctttaaatattgcggaattaatttttgttgcttaatttgagcgatactcttatttgcagcagcaactaaagttggtgagttctttggaaatgcaatcgctgaaccttgcatatctgcccctaagttaaatttaccgtcgatttgaactaattcaggatcattgctggcataagccgttgccactggtttttcggccacaatcccgtcaattttatgactcttaagtgctaatactaaatcaggcacttttgttaaacctgtaatctgtgcatttttaatttgttttttagctaatgtttgttggagactcccggtttggaccccaaccttcttaccgataaaactgttttttgatttataaatcttggcgtcggccttgttgacgaggatcgattgaccacctaagtaatagacatccgagaaatcgacactcttagtccgttcatcggttggtgacatcgctgaaattaccatatcgaccttgccagtttctagaccaactaacaacgcgtcaaaatccattgacttgatcactaacttaacgtgtaaatcgtcagcaaccttttgtgcaacgtcaatatccatcccaacggttttatttttgccgtttttattcactaaaaattcatacggtgcataatctgggcttgtccccaacactaatgtcttcttagcttgaacgcgactaaccgtctgccccgcggctgatacagcttggttattccccactaatagcgccactagcaaggctaatggtagtaaaatgaatgctaaactttttttgatagtcatttgatcccctcctatgatgtttttcataatacactactataaatatttatgcaatatttatttataaattaagaataattggcgaactgatttttatctggtatgatagactcacatcagaaaagagggatattatgggcttaaaagtaacacgtcaaacagatttaactagtttattcgacaaatttgcatcaattcccggcgatcgggaaaaaatggcagctgaagttgaagaaacggctgaaaaattaaaagaaacggaatcaaagacaactaaaaaagaataatcaaaaagaggtgcggacaaaattactttgtccgcacctcttttttaatacctgacttatagcccacgctttaattattctgcgtgtcgttctggatagcgttctttaagcttttcaatattttcttgtgctactttttcaaagtcgacgttattccattcagcaatctgtgatagataccagagtacatcaccaatcttcttggtaagtacttgttcatctagttggtggccttggaatgtatattttttgacaatatccacgacttcgccactttcgctagctaaacctaatgccaagttcgttaaaacttgttcattaccatatagcgttctgttcgctaatttttggtactcattaaattccattaacgacgacctccaatatcacattgttgttcgatccattcccagacggtatccttaccagcaccagtcaacgcactgaagcagacaaacttatcaacggggttaaaatcaagcgcctctttaatgatcttttcttggcgattccatttcccagttgagattttatccatcttagtagcaacgactaaaactggaatatcgtaatacttagcaaagacatacattgcgatatcgtcatcagttggttcatgacgaccatcgatcaatgaaattaagccgcgtaaattatcccgattagtgagataagcctcgataatttgcccgaatttttcccgttgtttcttagaaaccttcgcatagccataaccaggcacatcgacgaaataaagttcattttcaacacggtagaaatttagagtttgcgtcttccccggcttacttgatgtccgtgcgtaactcttacgattaattaacttattaattaaagaagatttaccgacatttgagcggccagataacgcgatttcaggtaattggtcagtggggtactgcgaagcagctaccgcactcatcaccatttcaacttcatgtacttccataataacctccgattatttccttcgaatgctagtttagcataaataaataattattgcgccgttgacttattttcaaatccatgtttagcggcacccttatgtaaaaaaagttgccgggtcgattacaccccgacaacttcatagtcattatgacgcttcttgaccatcagctaagaaaagttgtggtttagcagtgccatcaacggcttcttttgtcactaagactttgacaacgtcttcgcgacttggtacatcaaacatcatatccatcatgacttcttcgatgattgaacggagaccacgcgcaccggtattacgttcaattgcaaggtgagcaatcgcatgtaatgcctctggcgtgaattctagttcaacatcgtctaaagccatcaatttgctatattgtttaactaaggcgttcttaggttccgttaagatccgaactaagtcgtcttcagttaatttttcaagtgcagccgtgattggaatccgaccaatgaattcagggataatcccaaattgcattaaatcttccgtcacgatttgttgcatcaagctttgattttcatcaaccgcttggccagctttgctaccaaaaccaatcgtcttttcacctaaacggtttttaacgattgtttcgatgccatcaaaggccccaccaataatgaataaaatattggttgtgtcgatttgaatcaattcttgttgtgggtgcttacgtccgccctgaggtggcacgctagcaattgtcccttcaagaatcttcaaaagtgcttgttgcaccccttcaccagaaacatcacgggtaattgagacgttttcgctcttcttggcaatcttatcaatttcatcgatataaataatgccacgttcagcgcgatcaacatcaaaatcagcgttttgcaagagcttcaagagaatgttctcaacatcttcaccaacataaccagcttccgtcaacgtcgtggcatctgcaatcgcaaatggaacgttgaggatccgtgctaaggtttgggctaagaatgtcttacctgagccagtaggcccgattaaagcgatattactcttttgaagttcagtatcacctttttcggcaaccgtcatttggttaacacgtttgtaatggttataaacggcaactgagagcgcctttttagcttctgtttgaccaatgacataatcatttaaaattgcaagaatttcgcgtggttttggtacttctaataagtcattaacagcttcatctttaaattcttcatcgataatttctttacagagatcgatacattcgttacagatataaacaccagggccggccacaatcttctttacttgatcttgtgatttaccacaaaacgaacaagtaacagggccattcgttgtttctgtatcatctaacatactgggattctccccttcctatacatctatcatagcagatttctaatattagtcatctcagaccgcttagaaatgtaattaagactatatcacatcactgcgctagatgaaagtaatccgtttttaacgccatataacgcaaaagcgggttcaaagtagtcaccttgaacccgcttttagaaccgattaaagctcatctaactatctaattatttagcgtctttaacttcaacagctgaatcagcaatcacttcgatagctttcttaacaccgatatcatgttttaacatgtcatctgataagacgctgcgaacagctgattcttccatgttgtattgttctgctaaactcttaagttctgcagcaacttcttcgtcagttgcttcgatcttttcagcttcaacaacagcttctaagacaaggcttgtcttaacgcgtttgtcagcatcaccggcgaattgtttcttcaaatcatcttctgttgtaccagtgatttgatagtacatttctgggttgataccttgttgttgcatgttacctaagtattgttgtaattgactgttgatttcttcgtcaatcattgcttgaggtaattcaggaattgttgcattttctgttgctttagcaacggctgtatcttggatagcagcgtcagcagcatcattcttttgttgttttaattcttcacgaattttttcttttaattcgtctaatgaatcaacgtcttcgtcgatatccttagcaaattcgtcatcaagttctggtaattccttacccttaacttcgtgaatcttaaccttaaagattgcttctttaccagctaattcttctgcttggtaatctttagggaatgttactgtaacgtcaacatcttcttcagctttgtgaccaactaattgatcttcaaaaccaggaatgaatgagtttgaacctaattctaatgagtagttatctgcttggccaccatcaaaaggtacaccatcaacagaaccagcataatcaataacgactgtgtcgccattttctgctgctgcatcttctttaagtactaattcagcttgacgttcgcgacgtgtttcaagttcttgttctacgtctttaattgtaatacgacggctttgttttggtacttctaagcctttgtaatcgcctaatttaacttctggtttaacagtgacttgagcagtaaggacccaagcttcacctttttccattttttcaacattaatttgtggttgatcaactggatcaatccctgcttctgcaacagctgcttcatatgcttctggtaatacagcatttaaggcatcttcgtaaagtgcttcttcaccgtacatcttgttaaagatttggcgaggcatctttcctttacggaaaccaggtgtgttgatgtttttacgtacacgtttgaacgctacgtctaaaccttcactaattttatctaaatcaatttcaaaggtaagttcaccatcattggcgccctttttttcccattttgctgacataatttccctccgacagttatattcacaatctatcaattgcatacttaatcagcataaactatttgacctaaattgtaaatatttattggcctaaaaaaccgataaaatccgtttttttagcgattaaagcgcattattgattgaatcttatgtataaaaaaactcgcagcttttacactacgagtttttccaattcaactaagttgaatattagtcaataatttcacttacgacaccggcaccaacagtacggccaccttcacgaacagtaaatttaagacccttttcaatagcaactggtgagattaattcaacagtaaatgttacgttatcaccaggcataaccatttctacaccttctggtaattcgataacacctgtaacatcagttgtatggaagaagaattgtggacgatagtttgagaagaatggtgtatgacgaccaccttcatccttgctcaagatataaacttcacccttgaagtttttgtgagtttggattgaaccaggtttagctaaaacttggccacgttcgatgctttcgcgatcgataccacgtaataaagcaccaacgttatcgccggcttgaccttgatccaatgtcttacggaacatttccaaaccagtaacagttgttttagcaacttcttctttaagaccaacgatttcaacttcgtcaccgacagtaacttggccacgatcgatacggcctgaagcaacagtaccacgaccagtgatcgtaaatacgtcttcaacaggcatcaagaatggtttgtctgtgtcacgttctggagttgggatatattcgtcaacagtagccattaattcttcaacagctttaacgtcgtcagcattgccgttcaatgcaccaagtgctgaaccgcggataactggaatatcgtcaccagggaaatcgtattctgataataattcacgaacttccatttcaaccaagtccgttaattcatcatcatcaactaaatctgttttgttcaagaagacgatgatgtaatcaacaccgacttggtgagcaagcaagatatgttcacgagtttgtggcataggaccatcagttgcagcaacaactaagatggcaccgtccatttgagcagcaccagtgatcatgtttttaacgtaatcagcatgtcctggggcgtcaatatgtgcataatgacggttttctgtttcgtattcaacgtgggctgtattgatagtgataccacgttctctttcttctggagcagcatcgatgtttgcatagtcttgagcttcagccaagcctttgtctgccaacatctttgtgattgctgctgttaaagttgttttaccatgatcaacatgtccgatagtaccgatgttaacatggggttttgttctttcgtaatgtgctttttctgccattaaacgaacctcctgtattttcgcaagaaaaaatcagcgtatagcatttcactaatactgataatcctttacgtaatattataatacttcaagcgttaaaatcaaagtgtttttttacgcttaaagaattcaaaaatgattatatctgctatgagcgcgtttgtaaacacttaagccttaaaaaaagtattattttacacataaaatcgttgttttctagccctaaaagactagttcttctgttaattcttgcaatttttttagccattgaatcgtcttttctgaaatctgaactgttggctcaaacatagacagtcctaactgctgaatcagtgcctggccccattcttcaggattatcgatgactgtttcctcgaagggataaagataagcaaacgtcatttgacactccgctaaggccgcttcgaggatgatgggatcttgttgggctaagatattctgaattgttttttgaattaattttaaaatgggccgattagccatcaattctagctcgccgggaaccacttctcgtacttgttcaaaccaattaatcgtcactgcttttgaataccgcagacgcacgagcgtttctaagaccgtcgtttttacaaatggatgactgtacggattcaccaaaattggtaacacaccctgtaaataatcagctagtggtaataattctgcttcatcaagtcgttgttgttgatcctggaaatcaccggttgtaaggttgtaaagtcgttcttgccgtttcttaattgtctgcttttcagccacctgataggctttttcagccgttcttaacgtctcttgtcccttttgcttggtctgctgttcaaacacgtcagtcgcctctacagtagcccacaattcgttggccgcgatgaagtgttgattatcaatgagtagcgcattatatagcaaccttaaatcgggctcattggtatagaaggccttcttctcaaatgctaattgtaaggcgtgccgattatcgccagcagccaccagtacgctgaccaataaaaggtttaataccgttgtctgttgtagctcgtaagcagcctctaaaggggctattgcctctggccatcggcgctgattaagcgctactttgcctaaacggatcaagttttcaaattgattcggcagtgccgtcacttctcccataatgacctctcctctttaaaaacactaaattaaaagggccccgataaataatcctttatccggcccttttttaagtgtcatcacttaattaatcttgttttttctcaactactggtttagtgtctttcttttgacgacggtgattttggttaatttccataattaccggtaaaataactggacgtcgttttgtttgttcgtataagtaatgacttaaattttcacgaacgtcttgtttcaaatggctccagtcaaattctttattatcaagattgttctgaacagcttgtttaatgatttctgaactctctgccatgagatccttgcttgttttaacgtagacaaaacctcttgccgttacttttggttcagcaataatcttcttattcttccggtcgattgtcacaacggcgataaaaataccatcttctgacaataatttacggtcgcgcaagacaatgttgccgatatcgccaatgccactaccatcaatcatcacatcagtggcatcaacttggcccccaacatgcatcttaccattgtcataggcgacaatatcacccttaccgacgataaagatattcttataatccatcccggtttcatgggcaatatccgcatgcgcagccatttgtcggtattcaccttgaaccggcattaagaattgcggatgaagtaaattcaacattaattgtagatcatttttattagcatgacctgaagcgtgtagatcatcaccgacagctttgacctcgccacctgcgcgataaatcatatctttagtcttcgctaagatggtttccattgcatgtgaaggagatgtcgtcaaataaacaagatctccttgttcaatatggattaagcggtgatggcttgttgccatcttttgaagggctttgattggttcacccatccggcctgtttcaaggattaccgtttcctcaggtgctaatgtacttagcgctttaggttgcactaagatgtcttcatctggcaaggttaacatttctaagcgcattgctgttcgcacaattttttccaaatcacggcctgttaaaacgaccttccggtttgttttataagcggcatcgataacttgttgaatacggaggatatttgaggccactgaagccacgataatccgcccgttttgatatttaaatgtttctaaaattgattcggcaatatcgcgttcattagccgtttcaaaaggtgattccgcattagcagagtcactcaatagggctaagacgccttgttgaccgatttcagttaaacgggcataatccgtttgatacattggtaatgctgattgatcaaacttgaagtccccggtataaacaatttggccttcatctgttttcacaacaatccctaacgaacctggaatggtatgcgttgttttgaagaatgaaactgtcgcttgttcaaaatcaattgctgtattggcattaatcacgtggaaattattgaaatgccgtaatttaggttcgctgctgaccgtaatcttagcgagcgcaattgttaattcagaaccaaagacaggcacatcatggcctttcaagaagtatggcaaggcgccaattgcatcagcgtgaccgtgcgttaggaaaatcccagcgacacgttctgcattttcttccaaataagtcatatctgggattacaatatcaatccctaataattcagtttctgggtattttaacccacaatctaagatataaatttcgtcgttaacttccacaacgtttaaattcttaccgttctcgcgtacaccaccaagtggcataatcttaatattactcattctttcacctctaaaattgaaagggttactttcaaactattatttgtttttttgagtgttactttcgtttaaaactcatccgctttaaagtctaatacatattttatcacaatttaaacaaactaacagcttttgattactaaaggccttacattttcaagttcatcttaaaaaagcgcacaaaaaaagcaaacagccaaaaagactgtttgcttttaaaggttgaattaacgacgtaagccaaggctcttgattaattcacggtaacgttggatatcgttgtcacgtaagtaacgtaaaaggttacgacggtgaccgattttcttcatttgaccaacatatgaatgatgatctttcttatgaacagataaatgttcgtttaatgagttgatttctgcagttaagacagcgatttgtacttctgctgaacctgtatcgccttcgtgacgtgcatattcattgatgatttcgttttttcttgcttgtgaaatagccattgctaatttccacccttcagttatattacccgaaacaacgaatagcgtcgggtgaacgtcgctaaacagagtaacgggtttgtgcttttaaagcactgtcttagtttactaaaaaattatgctgaaagcaaggctaagttcaaattcattaagcagtcaagtttaaatactttacaagtttctattgcaatcccccacactattttggtataataacgtctgttgaaattaaaaatcttttttataaagatagtgaaacccatcggaggtgaacaaccatgccacaaattaaatctgctatgaaacgtgtgaaaacaattgaaaaagcaaacaacagaaacgcttctcaattaagcacaatgcgttcagcaatcaaaaagttcaaagctgctcaggctgctggtaacgaagaagctgcagacctattgaaagctgctacacgcgctattgatatggcctcaacaaaaggcttaatccatgctaacaaagctggccgtgacaagtcacgtttaaacaaaatgatggctaagtaattctaaccaatattttaataggcccgactaagacgttttcgttttagtcgggcctatttttttgtgttttatgccacttttttagcggcaaattggagcatgaacaattcaaataacaattcaggttgtccctgtccggttttaattttaacttcgatttcttctaaacctaagtaagcttgcgctaaagtttgctttgaaaaatgtttaatctgttgcatcgccaatttaattcggtacggatgaatttttaaaacactggctagattaccctgactataccctttttcgaataaaattttaacttgcaatagtaagcggaattgaccgatcagaatcgcgttaatcttgagcggctcttctttttggagtagtaattcatgatacatcgtcaaaacggggcccacttttttctgcaaaacaagcggtactaatgaaaagacgttatcttcaatactgctgctgaccaattcagcgaccgctgctgtcgtaatttgcttagtttgttgtgcgtacagcattaatttcggtaattctgccatgatttggctatagtcactattggttttactaatcaataaggctaacgcttcactttcaatctgcatcccctgttgcttcaactcagcggttaccaactgttgaacttggcgctcattcactttttcaacagaaactaatgaagcaaccttttttaattgcttcacgatttttttacgttcatctaacttagggtacggcgcaaatagtaccacacttgttgttggttgtggcttttcaagataggcttggaaacgaactaaatcctgatcgagcttgtttttaaccttttcacccgttaaaaaatagggattttgcataaagacaattcgccgctcaccaaaaaaaggggccgattcggcatcatccaaagcattcgccacatcggtcgttgctaaatcatagctggcaaaattcattgtttgttcttcttctggtagatagtgtttaaagagttgacgcgctttttcaatcaacgctgactcttgccctaaaaccaggtaaatcggtgctaattgattttgttgaagctctttttgtaattgttcaattgtcatttttcactatcctttattgttgtttgcagtttttcgctttgaccgggaccgtacgcccaggtcaacatcccctgctgcgccgttagccaataaggcactttggccgcttgcaaagtcgtcaaagtttcctggtgcggatgaccataacgattctctctgccggttgagattaatgcgccttttaagtgcaattttttaatcacggtggggtcactagccgttttactaccatgatggccaacttttaaataatcgacggttaattgtggataccgctcgataattgcccgttcaccttcttgttctagatctcctgtaaaaagccagctagccccaccaatttgtgcctgtaagactaacgaatcactattttcgccttttcccggcttagtcggtgctaagacgttaaatttttgcgatcccactttaaaagcggccccggctaaatagggttctatctgaaccgttgctaaaaatggtcgaatttgtctttgaaattgccgattttgcggtaatccggcagcacaaatgattcgatcaacacgaatttgttttaaaatctggttcaaatcaccaatatgatcggcatcctgatgagaaagtgccaccgcatcaatgtgatctactccttggctatagagataattaaccgttactttttccgctcgtgaaacctgcgcccgccgttgccaagctgcttgcggtagcgctaggcgaccaccagtatcgattaaaagctgatgccggttaaacggcgtctgaatcaacagactatcaccttgaccaatatcaaacatgaccacccgaccagtcggattaaaatgaatcgccaaaaaactagccagatacaaacttaccaatgtgcgtttcagccgtttacgccattgattactaattgcctggccatcgattaacaagagactgaccgtcacaatcaatagtaacggtaataatggtattttaccaaacgtaatcatcgcatggggaatttgagcaactagtcctaagcctttgtaaatcaactgtaacagccactcacatccgttaaccactagattgctaacaggtaacatcacactcgctacaatcaccaaacctagcacaattggcagatagataggcgttaccaaggcattcatcattatcgtcagcacatgccagcgataattaaagcgtaagcaaaccggcaaactcaataaacttagccagtaagcaactttaaaagtgctaccctcaccaatataaatgagcgcaaaggccatcaaataacttaaaatcccgcccatactatgtagcaaataaggctgccagaataaattgaccagtaatactaaactccaactatctaaccttgattgccgaatgcccaactgtttgcaaagtaaccgggataaaataagcgcaatcgcgcgactaatgcttgtcgtaccaccaaccagtaaggcatataccggcaatagcccaaataacatacagtttaaccactcacgcggtatgcggcaataagtcgcacaccaccgaatgacttgcactaaataaaacacgtgcaaccctgatagacttaagagatgaataatccctaagtggcccaaaacaacctggtaatggtcaacttgcgcttcccgcaaacctaatagtaacgtctgcgcatgaaaccgtagtgctgttggtaacttacgtaaatacagtgcacacgtttggcgccaataatgtagccaatccaaaccgctactagggcgtctcagcgcaaaagttgtttttttggctaacgtcagttggtaaaagcagcgcttctgttgcgctaaaaaacgggcataatcaaactcattttgattggtagcaccctgtatacgtttaaaatctttttccccatagaacaaaacggggtgtcgtacttgctgccatcgccgcttctcggcgaacgtttggcagcgataataagccttaatagtctgaccatcttgttggccgattgccgttaattggacactatcgcccgctacttgaatcgcatcgggttgcactttaaagtactgtgctaccggttgttgcggttgcgtcacactatgatagcttatccaaaagcggcccccgtaaacaaggcataagccgatcgtcataatcgttatctgagtttgtctgagacttattaatttgacaaaagccaataataataagctccaggttaaccaagattgccccccaagcattaagctatttaaactgattaaacaaataactggataaatccagttgtttttcattcagtcgcttgttcgttctccaagaaattaacgagtgtgtgcgcatcatcaactgataaattaacttgatcaagttcaatccctgatttttcaattaattttagcgcgtaaggatcattatgataatctttttggtaatgaatcttactgatacccgcttgaataattagttttgtacattgtaaacaaggaaaatgcgttacataaatttcagcgccttcggtttgaacgccaaatttggcacattgcgttaaagcattcatctcagcgtgaatggttctgagacaatgaccatcccgcattaaacagccaacgtcaatacaatgatcttcgtgagccaccgagccgttataacccccggcaataatccgccgattacgaatgacgagcgcccccacaaatagacgtggacaggtactgcgcatcgataataaaaccgactgtaacataaaatactgattccaaggcattctcttattggccatcatcatgctccctttaattgtttctttctagtatagcaaaaataccacttgataaaactaattcacacaaatttgtgattgcaattgttcaaacgtcttcggaccaatcccgccgactttttgtagatcttcaatctgtttaaattttccttgttcatcacgataagcaattatttgttcagctttcttggggccaatgccattgagggtctgaagctgcgtactatcagcctgattcaaatcgattttagcagtgtcactcgtgctcgatgcattcgcacttgtcccagttgatgcctgttcttgcgtacgctcactggtcgttgcgatttgttgtggcgcttgaatgagttcttgatcagtaaccacctctccttttttcggaatataaataatcagttgatcggttaacttttgagctaaattaagccgcttggtatcagccgcatcagtcggaccacctgcatttttgagcacctcaaataagcgcgtttcagagactgtgatcggataaattcccgggtagaccaccgcaccttttatatcgacaaaaccgccttttttcttggttgccgcttggtgtgtcttcttagtagcgggttttgttttagacgcactggttgctagcagttgctcattttgcgttactttttgtttttgttgcgattgatgccaataaaagccacccgcgatgatccccaatagcactaagcaaggcacccaccaaaaacgccgatatcgctgccaataatcttgccacatcatcgtcacctccttactcttatatacccttaaagcacaaaaaagtttgccgattttatcttcggcaaacttttttaatggtttttcaaataagttaacgcatcatctaaggttttgaccggtacgatcttcatcttagtatgaatttttttagcggcatttttagcgattgtataattattttgataatcaggatcaacctttaaaattgcctttgttacaggatcattcggtgcaaaaaagaccgttgcgccttcttgactagcgaccagtacctttttatcaatcccaccaatagcacctacagtaccatcagcagccattgtgccggtccccgcaattgtacgacccttttggagattttgcttcgttaattgattataaacttgcaacgtaaacatcaagcctgcagatgggcccccaatatcaccggcatcaattttaaccgggatattggtttcgattttagaatgatctgttaacgtaatcccgaggcccggatgatgcgtccttggtaatttaatcaaacgatgcgttgccgtttgatgtttttgaccatgatcgtaactaaccgtgaccttttgaccaactttcaaaccttggacatactttacaaaagcattggcatttttaaattgatgatgatcaatcgcggtaatcgtatcaccgactgctaaatcatctttaaaagtggagttgcctaacatcgacatcacataaacgcccagatacttcgtatggtaggccttatcagcttttttataggcggcttcaacggcagcgttaattgaactatccatatagtacttttgaatctgttcgtaagcttcggtatcttcattgcccatcaattcgtcacgactttcaatttccgtaaaaggttgcgtcttggacaataataattgcaacggtgttactggacctctgacaccaacagttgtcagcataaaatggcctttttgatgatcatgtttaccgtcgaccttaacatattggctggtattttctgcggtcccggcaccttcaatataatagccagtgggcattaaacaaacaactgcaacaatgattaaaaccacaattacaattaatcgttttgtcagtttcttattttttggcatgctaatctcttccgtgttttaatttttcttgaagtgcaactgcgactgctggtggcactaattgatcaacttgaccaccaaaagcagcgatttccttaaccatactagatgaaataaacgaaaattcttgttttgctaataacaacacggtttctaattgtgcatcttgcgtttgattgagcgctgcaatatcccgttcgtattcgaaatcattagcattccgaatgccccgaatcagatagcgggccccaactgcttgcgcaaaattagcggtcaacgttttaggttgcgctaccacactcacattgtccaaatcggcaatgacggtttcaatcaatgcgactttagtgggaccatcaaataatggcttcttcgctgcgttagtcatgactgcaataatcacgcggtcaaataaccgacttgcccgttcaactgtatctagatgtcctttggtaaaaggatcaaaactgcctggaaataatgcgattctttcagtcatccgaccacttccttaaccgataaattcgaaaattgccacttcagtaatcccatagttttgttggcgtttcaatgtataatgtgggatttcttcagggtacgttaaactcgtgtctgtttcacaaagaataatcgcccctggttttaagagatccatcttcacaaattgttgtaattcgactaacatttgttgttgtttatagggtgggtctaacaaaattaagtcaaactgttcttttgcatctgctagttttaacagtgctttttcagctggcatcttccagattgtgaaacattcaggcatctttgtcactgctacgttatcttgaatcgtttgaattgccgcgtattggcgatcaattaaataagcatggtccataccacgcgaaacagcctcaatcgcgaggccaccgctaccagcgtataaatcaagcgcttgaccaccatcaaaaaattgccccagcatactgaacatggcttctttcactttatccgttgtgggtctggtcttcattccggggaccgcctttaagcgacggccaccaaattctcctgcaataatccgcatctctttactcctttaatgccgctttagtagcggtctcttgattcgctaattcggctaatgcgccaaattccatatcgagcatggggcgttgcgaacgcgttactcgtttaacatagtgtagtttctttaatcgttcgataaccgccggtgcttggtccgcatcaacgtataaataaacgtatttcattcgtttagacgtataatacacaagtccgtaacgtcgcaattgtttgacttgccgtaatgaatacagccaaacaacaatgccttgtcgttgcgtcatttctaatgccattttatcagtccttatcttgtaatttattcaccaatcacaaccaaggtatgaccctctgtacagataatttgaatccgctggtaggcttggtcgtgaattgctcggtaaaatgctggattggtctgccgttcaaaaatgagctgttgcacactgactggctgatcaaaataaaagagctgttgtttagttagttgataatctgctaaagccttcgcggtaaaatctgcttcagttaatttttgtggtaaggccgtttgtcgttgttgtttagcacgcttcaatcgtcgttttccagaatcagttaacaacgtcttaggtgcctcttccagcgtctttagaaatagttgatcagcttccagtaatacgtcgctccgtaactcaggtagcttggcgttgagccgtatcgtctgacaatactgtaataatgccaattgccgctcatcatcaacttgttgtgattgacctgttgcgacttctggcaccggtactggcgtcattgaggttactggatataagttcgattgcaacaagcaattggcatttaaataaaccaccgtcgccacgccacctttttgcattaccaaaatcgcataggttttattcttaaatgcaatcagtggtcgctgccgttgttgcgtttcgttcaactcaatttgaaatttttgttcatgtaaattaagctcataattggctggaatcgtcgtaatctgagtaattgcctttaacgactgcccaaattcaaacggcttaatcgcgttatcttgaccaatcaccactaattgttgcgttgtccctgtttgatcgtcaatcgttgcttcaacataatgccggctatttaattgaaataaccatcggctctgcaggccatcttctaccgactgtttaacaggttgcccatattgcgctaccaatttcgtcgcaggttgattaataaacttcgccggaccctgcgtctttaataacgggttttgcggatgcgtcaattttgtatgccgtttaacccggctctgcgttgaatcagctgttggctgagcatgatgcataacgggccatgcatataataagactaaccatgcccccaatgcgattaaaaaacgccccaaatttttcatttgtgagtcctcacgattgtttcattttaagcgcctttttttcctgagcactgacgttcaagactaagcccaggcctgtcgctaacactagcatgcttgaccccccataactaatgaagggtaaggtcaccccggtaattggtagcaggcctaacagaccaccaatattaaacaaactttggacgaaaataatcgtgcctatcccataacaaattaaggcattataggtttgacgcgctctaattccgatggtaaaaattctaaaaatcagtaaaaagagtagccctaaaataaaaagggcccctataacgccgagttcttcagttgtaatcgataaaataaaatcggtataaggttcaggcaaatagcctcgtttttgaatactattaccaagccccataccaaaccaaccaccgttattaatcgcataataggaattaacgagttgactcccacccatattttcgagtttgaatggttctaaaaaggctagaattcggttgaaccgataattgaccccggtcgttaaattcaagcgactcaatccggcaatcgccgcagtaataacagctaaggttgcactgatgattgaaatcccccaccaaaaagagatgccactggcaaatagtaataccaataaaataatccctagaattgccgcaccaccagtatcaggttgtaccaatacaaaggcgataatgacggccaccaaaatcacgggtgcggaaaacaacttaacattgtcacgccaatgctccgacagattcttttcacgtttggataacatgttagccaagtataaaacaattaataacttagcaaattctgctggttgaatgctaaagggtcctagattaatccaagcagttgccccattaatcgcagcgtccggtctaatccgacttaacaccaataggtaaaagagcgccaataaaatgacgactgtcacaccaattaaaaacttaggtttccttaatagatttaactttaaaaagaaggaaaatagtaataatccaaagccaaggccgatataaattaattgcttagtaaaataagcatccggcttagcaccatgaatcgacattaaatccgaactcgctgaatagaccatcaaggccccaatcgcacataaaataacgtacggaattaataaccaataatctaaatactgcgctttatctcgaagcttatgccacacacttacacctaatttctatgaacttcattctgagcttgcgtttgataaatctctaaataaagttgattaatacgcgtttcaagttcatttactaattgcgatccttcttggtcactaattaaccgaactcttttggcaaaatcaacttcttttgtaaaaccaaacagttgtgtatcaataatttcttcaatgatgggacattgacttaaacaaagcgcgtcgaattgcttcgtcaataacgcttcaattttagctgcgtctgattttaaagtcatatacccgattgtttcttgtttaatcatcatttaacgcccacttaaactgttatagtaatgcacactctgcaggttattataccatatctgacactaaaaaaaggtagcctaaagtgtcttaggctaccttttaatatagttttaagcttattatccgcgtttacgcttcttgtcagctttagtacgcatacctgtgtcaagaatcttcttacgtaaacgaacagaagttggtgttacttcacagtattcgtcatcgtttaagaattcaattgattcttcaagtgacatttctttaggtgtcttgatagcagctgagtgatctttaccagaagcacgagtattcgttaagtttttacccttagtaacgtttacggcgatatctgtatcacggctgttttgaccaacgatcatcccttcataaacatcaacgccagcgccgatgaataattggccacgatcttcaactgattgtaaactataagttgttgatgaaccagcattgattgaaactaatgcaccgttacgacggcctggttcccagtttttaatcactggcatgtatttttcgaaggtgtggttcataatcccgtatccaccagtcatcgttaagaattctgttgaataaccgattaaaccacgtgaaggtgctaagaaagtcatccgtgtttggttattagcatcactttccatgttttgcatttcacccttacgttgggccattgaatcgattactgagcctgtatattggtcaggtgtatcgatttgaaccatttcaaaaggttcgcaagtaacgccgtcaatatcacgatagataacttctggacgtgataattgtaattcgaagccttcacgacgcatttcttcaaccaagattgaaagatgcaattcaccacgacctgaaacaatccaagcaccggctttatctgtatcttcaacacgaagtgaaacgtcagtgtgtaattgatgacgtaaacgttcttcaatcttacgaccagtaacgaaatcaccttcacgaccaacaaatggtgaatcattagcagcaaatgtcatttgtaaagttggttcgtcaatccgtaaaattggtaatgcttcttgatggtcaactggtgtgacagtttcaccaacgtagatatcttccatacctgaaacagcgattaaatcgccagctttagcttcttggatttcaacacggtctaaaccgatgaaaccaaaaatcttcgtaacccggaagttcttagcagaaccgtcaagtttaagaacagaaacttgatcaccgattttgattgtcccacgagaaacgcggccaataccgatacgaccaacatagtcgttataatctaacatagccacttggaattgaagtggttcgtcactattatcaactggtgctgggattgtatctaagattgtgtcaaagataggaaccattgtgtgagcttgtgtgtctaagtctgattcaagacttgatgtcccgttgatagcacttgcgtacacaactgggaattcaagttgatcttcgtcagcaccaagttcgatgaataattcaagcacttcatcaaccacttcttcaggacgtgagcctgggcggtcaattttgttgataacaacgattggtgttaaatgttggtctaaagcttttttcaaaacaaaacgtgtttgtggcattgtaccttcaaaagcatcaacgactaataatacaccgtcaaccatcttcatgatacgttcaacttcaccaccgaaatcggcatgtcctggtgtatccaagatgttgatttgtttgccgttatatttaacagcagtattctttgaaagaattgtgatcccacgttctttttcgatatcatttgtatccattgcacggtcagaaatttctgcatggccatccaatgtatctgattgttttaacatttcgttaactaaggttgttttaccatgatcaacgtgggcgataattgcgatattgcgaatgtcttctctttttttcaagtgtttcagcttcctctcgctagtgacttaactagtgttgtttgtctcatgtatacaagctattattttaccataataaacagggctatgcttcttatattagcgattttttgaaaatacgcaagactttttcatgaaaatctaattattcggccgtttttgaatgggccataatggcgataatttcttgcatcgcttgctttggtgcaataatcatcccttctttggcaaccattgaaattggttgaccatcgaaatttaaaatctgaaaaccaagtgtctcggctaaaacgcgtcccgcagcaatatcccatggtgctaactttgaaatataagcttgcgcattccctcttaacaattgcgcaaaggtaatgccggcactgccataaatacgcacacctgaactttgaacgaagacctgttgtaattgtcgttcattcgtcaccaacatgcgtgtattaacgcagattaagccttctgatagcggttgatccgctgcctgttctaaggcttgttcattgcggaaaattcctaattgcggaccaccccagaaaagttgatcagccatcacatcgtaaataatcccgaataaggcttgtccatcttcgtagaccccaatcataatcgcaaaattttcctgttgcttaacaaaattcattgtgccatcaattggatcaacgaaaaaagttagaccgttatgccaatcgccagcaccgacattggccccttcttctccgactaattgcgccattggatattccgctttgatttgttctgcgaaaaaggcttggttcgcgcagtcgacgttggtcactaaatcattacgacttgatttagtcataatttctaaaggttgtgtcatctttttgcgtgtttcagcggctgcttcaagtacccacttttgtaatgaacgacttaattgatatagcgcctcttgttccatcttttttcatctactttcaattattagtcgtcatcttaatttgtgcccggccactcttttgagcagtttgcatacaacggtagattgaataaccagaagcttccgtaaaagctttatcaagttgtttttcaatcatcttgcttcgaacgacttgtttaaaatcacggtaggacgcgtttaaatcttcaactttagcgccaaattcataagcttgttcaacaagattatataaatgcatgacttgaaccacttcttctggtgtccaatctgattctaaaggatagctatagttagtttgcataagtactcctaaatttaagtcaatttaagcaaaattgacgtttttaatatcaatcattatagcgcatttttttaggaactgtcgaatcgttttagcaagtgtatacaaaaagggccgtcacaattcatgacgaacccttcagtgttagatgtgaattggtaggcctaatgctaattcagcatcatccataattgcttcactcaatgttggatgtgggtgaattgttaaggctaaatcttccgcattcatccctgattcaattgctaaggttaattctgagatcaagtcgctagcaccaacgcctgctacttgtgcaccaagcaacgtattatcgtcagtattcgttactaagcgtacaaaaccgtcagtttcagccaacgacaacgcacgaccgttagcagcaaatgggaatttaaaacctttggcgttatagcctttttcttttgcttcagcaaccgttaaaccagtggttgccaattctggatcagtataacaaaccgctggcatcgctttgtagtccacaatcacttttttaccagcgattgcttcggcagcaattttagcttcataactggccttatgagccaacgcagcaccggaaacaatatcaccaatagcatagatgcctttgatattagtttgaccttgttgatcaacttcgattaaaccacgatcagccatcttgataccagcttgttccaagcccatatcatcagtattaggacgacgaccaacagttaccatgacataatcggcaaccaattgttcttccttgccgccaacttcgtatttaacagtcacgttttgatctgtttcgattgattctttagccatagcaccggtaatcacatcgacacccttagtcttgaagttcttcgttacaagttgcaccatgtctttttcgaagtttggcaaaattgaatccgttccttcaagaatggtgacgtgggcacccaagttagcgtaagcacctgctaattcagaaccgatgtaacccccgccaatcacaactaattccttaggcacttccgttaagtttaaaccaccagttgaatcaatcacgcgtttgttgaacttgaagcccttaatttcaattgggcgactaccagttgcgatgattaagttcttgaaactataagtttgtgcactttcttctttaatgacccgtaagctatgttcatcaactaaaaaggcagaaccgtctaagacatcaattttgtgttttttaaacaacattgaaatgccgcccgttaatttttcgacaacttggtgttgtttccagtcttgcgtctttgcaaaatcaagcgttgcacccgttgttgaaacaccgaaaacttcggaattcttagcttcttgcaaacgatgacctgcagagattaacgctttagaagggatacagccgacgttcaaacaaatcccaccgatattttcacgttcaataaccgttactttttgacccatttcagctgctcgaatggcagcaacgtagcccccaggtccagaaccaataacgacagtttctaattcaattgcaaaatcacctacaaccatttttaaatcatccttccatcaatagtagctctggatcagctaataattcttttaattcgttcatcgcacgttgcgcagtcccaccatcaattaaacggtgatcaaatgataatgataattttaagactttaccaactgcaagttcgccatcttcgttaacaattggttctgtgccgatacggccaacccctaggatagccacttcagggtagttaacaactggtgtaaaccaaccaccaccgattgatccgatgttactaatcgtcattgaaccgccactcatttcagcaggttttaacttattatccaaagctttttgcgtgttttcgccaatttccttagcgatggcaaagatactcttgctgtcggcatctttaatgtttggtacataaaggccgtgatcagtatcggttgcgatgccgacattaatgtagtgtttataaacaatttcgcttgttgtgtcgtcaattgaggcgttcaacgttgggaaatcacgtaaaacagttactaaagccttaacaatgtatggtaagaaggttaacttaatatctttcttagcagcaacatccttaaatttcttacgatgggtcattaatttagaaacttcaacttcatcaaataatgtcacgtgcggtgcaatatgcttgcttgtcaccattgctttagcaattgcttttcgtgttggtgacatcttttcacgtgtttcaagttctggtgttgctgattcataaggtttaacggctactgctggttcaggtgtcgctgtggttacaggggcactcttagtgtcagtggttgtcgttgaagcaactagtgcagtaccattttgcatgaagttttgaatatcttctttcgtcgtacgaccgtgtttaccagtcgctggcacttggctaatatccacgttattctcacgcgcaaactgacggacagatggcattgccaatactttccgatttggatcactaatggcaaccacgcttgtgtcactactattattagttgctactggtgtttctgccgcctgaggtgctggcgttgttgctacgggcgctgaagctgttgcagtattgtggcctggtgcatcaatctcaacaagcacttgcccgactgttgcaacttcgccttcaccgactaagattttaacaatcttaccgctaacaggtgatgggatttcttcaactgatttatcgttttggacttctaataaggtatcgtcttctgcaattgtatcgccttctgcgactgcccatttttggatttcgccttctgcaatcccttcaccaatatctggtaacttaaattgataaacaccttcactggctgctggcgctgcaggttgttctgctgctggcgtagttgtttctgctgttggtgcatcgttaccttcaactcctggtgcatcgatttcaacgaggacttgacccactgttgcaacttcgccttcacccactaagattttaacaatcttaccactaacaggtgatgggatttcttcaactgatttatcattttggacttctagtaatgtatcgtcttccgcaattgtatcgccttctgcgactgcccatttttggatttcgccttctgcaataccttcaccgatatctggtaatttaaattgatatgccatgcttatgtcgtcccttccttcgttatcgactaaaagttaataacttctttaactttattttcaatatcagttgcgtttggtaaccatgttgattcagcttgcccaaatgggaatggtgtatctggtgctgaaacgcgaccaattggtgcttctaatgaaaggacagcgcgttctgaaatttcagaagccacttgtgccccaacacccgcttgtttttgtgcttcttgcacaatgacaacgcgaccggttttttcaactgatgcaataatggttttaatatctaatggggcgatggtccgcaaatcgatgatttctactgaaatattatctttagctaaattttcagccgctttcttagcctcgcgaaccattgcgccgtaagtgatgattgaaacatctgaaccttccaatgtgacagcagctttatcaagtggcactgtgtaagattcgtctggcacttcctcacggaatgagcgataaagtttcatatgttccaaatataaaacaggatcatttgaacgaatcgccgcaatcaataagcctttagcgtcgtatggattgcttgggacaactactcgaatcccaggaatttgggtaatcataccctcaaagttatctgaatgcatttcaggagtatgcacaccgccaccaaatggtgcccggattgtaattggcatattacgtgtgccacccatccgataacgagtccgtgacatttgaccggcgattgaatctaatgtttcaaaaacaaaaccaaagaattgaatttccggaacgggtctaaaaacttccaaagctaacccgattgataaaccaccaatcccagattcagctaaaggtgtatcgaaaacgcgttcttcgccatgtttagcttgcaagccttcagtcgcacggaaaacaccaccatttttgccgacatcttccccgaaaattaagacattttcatcacttgctagttctaaatccagcgcatttgtaattgcttgaatcattgttttttgtgccatcttaattcgactcctttgcactgtattctgtgatttgttcttgaatattttgtggttgttcttcgaatgttacttttaagaagtcagttaccttttgtttaggaatagcatctgcttcattgattgcttctttaatagctgctttaacttgatcaattaattcattttcttgatcttctgaccagaggcccttattcgttaagaaacgacgcatcctaactagtggatcacgtttcaaccaaatatcatctgtttcttttgtccgataacgagttgggtcatccccggagagtgtatggggtccataacgataagttaaggtttcaattaaaacaggtccgttgccagcggttgtgaaatctctagcttctttcatgacttcataaacggctagtggatccatcccatctacttggatagcaggaatcccggcagcaacccccttttgggctaatgtcactgcggctgtttgtttttcacgaggaactgaaatagcaaaaccgttattttgaacaacgaagattgcaggggctttaaaagcaccagcaaagttaatgccttcatagaaatcaccctgtgaagtaccgccatcacccgtataaacataaacggcattcttggactgacgtttcttcatcccgacagcaacacccattgcttgaatgtattgtgccccgataataatttgtggtggcattgctttgagtgattctggatacttgttaccttcaatatgaccacgtgaccataagaaagcttgtgatagaggtaagccatgttgcaccaattgtggtacatcacgataaccagggaataagaaatcatccttgttcatcgcaaaattgcttgctaattgactcgcttcttgtccggcagttggtgcgtaaaaacctaaacggccttgacgatttaaggcagttgcacgttgatctaacacacgtgaccaaaccatctgtttcatcaattcaacaagttgttcatcacttagatctggcatgatatcaggatttacaacttggccagtttcatctagaatctgaactgttttaaaatcttggctttcatcgccgagtagtttatcaaaattaactgcagctttattattggccataatattcattctcctcttcactaaactgttttaatgtttgcttatatctgtatcaattaagcttcttcacaaatataatttagcattttacagcactaaatgcaagcgttttacataactaatcatcaaacaccttgcgcttatcgttttatgtatatgtgaatttagtcaccaactgattagcatccgctaaaagcttcctctgttatataatatatttaaattctgttatataataacaaccggatcaatgcacaaaaaaagcgctagtacaaaccatcgtctgtactaaacgcttgttaattatatttgttggggtacttcacgccaagaccggttggggaatttcagcgttcccagcatgtactaggaagcgttgaacatccgcccaaactggttcaactcttaaatgagtcattagacggtgaagattaactagtaggcgcatccgtaattgaccgatacttacaaaaacaagtaaatttttgaattgccctgtttttgtaacacgcatcatcataactgcagtacaaattgctaagccaattgtcacaccaacaaaagcaaattcgttgactgcaaggaccgcaaagaatgatacaagtgctgccactgccattaagaaggcatttcctaggcgaaccttagcgatatcatccttaggtgatagtgtttcattcaacacgacacctctggtaccagttttaacaactgtaccagctttgatgaccgccatttctttatcaattgtcgctacggcaactggtgctttttctgtcgcatttaatactaagatgtcacctgctacaatttgatcaacaccaatttcacgtagaaaaccatcacgcacaacacttgccatctgatttgaatcggcaactaacgatgcgcgttttgcagcttcaatcgttgttaacccgcttggacgagttgccaacaaacgcattaacatcccgctgcttgtgattgcgtttaatgttgtttcttgctttaaattcttgtgcatcgcgttcgacactccttcccttttgaggaagtcgtcgtaacactgctagcctaatgctggcagtaaaaagacagaccacctcggatgatcactatcgctactacttaacggaccttcagctgtttgcaacattttactcaccagactttctaattaattttagagatcgcacttagttgtacaaaaaaagacgcacaacaattgagcgtcatccataacatcatggcgttcccaatcgttcagttttagcactatatgacgtagaaaccatgttcagctacgttagaaaaagccttcattggcagtttttgttgactcaattggcatctctcgatgtttctgagtagcagcgtatgttcatataggagcctcacctaacggaaaagcgatatctctatatacccattctactggttatcaataggtgggtcaacccatttgttccgttttttttaattctgtgctagaataacctatgatgaattaatcggaggtcttaactgtgatattaatgaaagatattatccgcgaaggtaatcctacacttagagaaattgcacaacctgtttcattcccattatctgacgaagatcggcaacttgccgctgacatgatgacattcttggaaaatagccaagatccagaaattgctgcgaaatatcaattacgcgccggtgttggtttagccgctccacaagtcgatgtttcaaaacaaatgtcagccgttttagtcccaggccctgaaggcgaagccccaatcttgaaggacgtaattattaatcctaagattattagccactctgttcaagacgctgctttagccgaaggtgaaggttgcctatcagtcgaccgcgaagtccccggttatgtgccccggcacgacagaattacattacgttatcaagacgttgaaggtgttagtcataagattcgtcttaaaaactatcccgcaattgtttgccaacacgaaatcgatcatttaaacggtattcttttctttgaccacatcaacaaagaaaatccatttgccgcaccggatgatatgattattcttgaataatgaactaacgaaaaaaggttaagccccaaattgggcttaaccttttttctatgcatttaattttgcttctgcaaattgactgttataaagcttagcataaacaccattagcggctaataagtcatcatgcgttcctttttcaacaatttgaccgtgatccatcactaaaattaagttagcatcccgaattgttgataagcgatgggcaatcacaaagcttgttcgtccttgcatcactttttccatcgccttttgtaataagctttctaagcgcgtatcgactgaactggttgcttcatctaaaatcaaaattttaggattagcaatcactgcccgagcaatcgttaagagttgcttttgtcctaacgacacgttatccgcttcttcatcaattgtcatctgatagccatttggcaatgtatggataaagtgatcaacattagccgttttggcagcatccacgacttcatattcagtggcatctagcttcccaaaacgaatattttccgtaatcgttgtgtggtacaaccaagcatcctgcagcaccatcccaaagagtgagcgaactgtctgtttactcaattggcgggtatcgacgccatcaatcaggatttgaccagaactgacatcgtaaaaacgcattaataaattaatcatcgtcgttttcccggccccagttggcccaacaatcgcaattttatcgcccggattagcagtgaaacttaaatcacgaatcaacggtttggctggatcatagctaaagctgacatctttaaattcaactttcccctgaacatcagccggtaattcagccgtttcttgatcagttggttcaatcggttcatctaagatttcaaaaactcgttgtgtcgcagcggcagcggcttgcatcacaccggataattgtgtgatttgcgaaatcggttgattaatctgccaaatatattgaataaaggcctgcaagttaccaaccgtaatgacaccgtgcaagacatagtaaccacccaaggttgccatcccagcgtaagtcaagttagtcgtcaaacccactaatggcatcataatccctgaaataaaggccgctttgaagccaaattcagtcaatcgatccgtaatcgctgcaaattcatcaactgctcgttcttcttgaccatacaacttcaagacactgaagccaccatagttttcttgaacatagccgttcatctcacccaaggtattttgttgcccttggaagtaaacttgtgactttttgatgattgctttagaaatcaaaagtgaggtcggaatcataattaaggatagtaatgccatccataaattaatcgtcaacatcatgacaaccgccatgatgatccccaaaattgaggtcaccacttggattaaactctgttgcaaggcattggtaattgcatcaacatcattagtaacccgcgacaagatattgccttgttgttgtgaatcaaagaaacggactggcaaagcgttcatctgtagattgatatcccgccgtaaatcacgcattgcgtgttggacggcacgcgtcattaaaaacgatcccagaaacatcatcgtttgataaagtaatgcaaagctgagaatcatcgcaatcactttagtaatgtaactaaagttaacggcgacgtgttgcgctaagttttgactaatttcagtcactgctagtcccatgataaatggccatagcgcattcgctaaaacggaaatcaccgttgcagtaattgctgaccagaacgttattttatacggcccaatatagcgcatcaggcgtttgagcaccttaatattcttcattgagctcctcctttgataactgtgaggcggcaatggcccgataaacctcatttgttttaagtaattccttgtgggtcccgatgcccacaacttggccttcatttaagacgacaattcgatccgcattcataatcgtccctacacgttgggcgacaattaagaccgtcgcatctttcgtaatcgattttaaagcgccccgtaaagccgcatcagtttgataatccaaagctgagaagctatcgtcaaagacgtaaatgtctggccgacgaacaattgctctggcaatcgctagccgttgcttttgcccacctgataagttgttgcccccttcggccaaatacgtttggagtccctctggtttttccgccacaaatgttttggattgggcaatcgttaaagcatcccataattcagcatccgttgcttccggattaccatagcgcaagttatccgcaatcgtgccggtaaagaggactgctttttgaggaataaaaccaattttttggcgtaatgctttcaattgataatcacgaacatcgtaaccatcaatcatcacttgaccccgtgtcacatcgaaaaagcgtggaatcaattggattaaggttgatttaccactccccgtactaccgatgaaggcgacggtttcccctggatgggctttaaaactgacatcccgaatgaccggactttctgtcggaccaggataagcaaacgacacattttcaaaagccaattcgccttgggtagtcgtggtttgaatcccttggtcatcatccgtaatatctacgggtgaattaaggactttttcaatccgttctgctgaaacagccgctctagggtacatcatgaagacacttgcgaagagcatgaatgaaaatagtacgtggaaaatgtattcaataaaggcaattaacgtccccactgccaagtgacccgtgttaatttgaaccgccccttgccaaatgattaacacgaacacaatattgaagataaatgaaaagccaggttgtgcgagggctactaatgtaaagagtttgattgaactctgactgtaggcttcattaacttttctaaaacgcatactctggaatttttcacgcacaaatgcgcgaataacacgaatcccagttaaattttcacgtaagtttaaattgattgcatctaagtttttttgttgttctgcagacattggttcggataaccaaccaatgatgaccaccccaactaataaaatcggaatggctgcaaaaacaatccatgataacgacagactcgtccgcacaatcataaacgcactggcaacgatcatcatcggggtcataaacccagttcgtaacacttgcaccatgaattgcgtcacttgaaacgcatcgttggtcgtccgagtaattaaggaagacacgccaaattcaccatattcatgatgtgaaaattgcatcgtctttttaaaaatatcgttccggatatcacgtgttaaattagtggttaagcgactccccgtgtaggctaggccaattaaccccaccaagccaattaaggaaataacaaccattaaagtcccatattgccaaaccggcccgaccgtatggcggttgatacctttatcaataatttgtcctaataaagttggtaatcctagttcaattaaaataaacccaaatacgcaaataaaattccaaaatagtagttttttatagcgaatggtatagcgccacattaatttcataggtgctaactccttcttgtttcaaatttagtccatcacacgtgccatatccttgacgtattcaatcgtttcccgattgacaataaacgccacatcaaaatggtactcctggtccaataaccaagcatccgtaatcactaacgctggatatttaggattaacggaggcaattcgtcgctcatctgcaacctcatttaaagtctgcgctaacgtttctgtaatcggttttaacgacacatccgtttgtaaaacatttacgcgatactcaaacaacatcacattcccgccccaaacttctgttggtaaattggcagtcaaagttgcttgtttcgtataaaattgcggttggacgctcaataatctttgatacgcaatattgacaatctcgtctaccgtttcttgactactactttgtaaaatccgcatggctctttgtcgacgaatacgatgaatgaaccaagctagaccgcccaccaatccaattaagactagtagtaataaccaaatcaacatggcaaccccctctttctatttgtaacggttgtcataattataaccgaattagagtaaactcgctattacgaggccattgctcaatgtatactttaaacaaaagatatgctaaaatattcttaaatgttgagtaatcaacctctggacggttaaactttcgtttaaaaataagatgaatatcaaaggagttttacaattgatttataaagtacttttccaagcagacaaaacacaaagccctctacgcgaggcaactaaatccctctatcttgaagctaacagtgccgttgaagcacgtcaacttgttgaagacaatacaccctacaatattgaatttgtacaagagcttactggtgaacacttagcttacgaacaagaatcagaagacttcaaattaacggagttctaaataaatgaaactcaatataaaaaacaatgaaacagccgtttttgccgtagggggtcttggcgaaattggtaagaacatgtacggtgttcaattccaagatgaaattatcgttattgacgccggcatcaagtttccagaagatgaattattagggattgactatgtcatttccgattatcaatatcttcaaaagaaccaacaaaaaatcaaagcccttgtgattactcatggtcatgaagatcatattggtgggttacctttctttttacaacaagtgccaaacgttcctgtttatgcaggtcctttagctcttgctttaattcgcggtaagttagaagaacatggccttttgcggtctactgaattacatgaaataaacgaagataccgtccttaaattccgcaaaaccagtgttgatttcttccggacaacccattcaattcctgatacattaggggttgcgattcatacacctcaaggggtcgttgttgaaactggtgatttcaagtttgacttaacaccagttggtaatcaaccttcccctaaccttcaaaagatggcacgtcttggcgaagaaggcgttctttgcttaatgtctgatagtaccaatgctgaagtgcctaacttcacgaaatcagaacgttttgttggcgattcaatccgccacattgtggaacggattgaaggccggattatcttcgcaactttcgcttctaatatttcacgggtctcacaagcaaccgatgcagcgattgctaacggtcgaaagattgcggtcttcggacgtagcatggaagctgccgttgttaatggtcgtgaattaggttatttaaatattcctgatgaagcactggttgatgcaagtcaacttaactcattacctgctgataaagtgatgattatctgtacgggttctcaaggcgaaccaatggccgctttgagccggattgctaacggtactcaccgtcagatttcaatccaacctggcgatacagttgttttctcaagtaatccaattcctgggaatacaacgagcgttaaccacgttatcaataagctttctgaagcaggcgctgaagttattcatggtaaggtcaacaacattcatacttctggtcatggtggccaagaagaacaaaaattaatgttgcgtttaatgaaacctaagttcttcatgccttgtcatggtgaataccggatgcaaaagattcataccgaactcgcccaacaatgtggcgttgaaccggataattgtttcatccttgaaaatggtgatgtcttagccttaaccgctgactcagcacatgttgctggccatttcagtgccgacgatgtttatgtagatggtaacgggattggtgatatcggtaacgttgtccttcgcgatcgtaaaatgctttctgaagaaggcttggtcgtggttgtcgcaacgattaacttcggtgagaaaaacattcttgccggtcctgatatcctttcacgggggtttgtctatatgcgtgaatctggtgaattgatcagcgaagcccaacgacgggttttcagaatgatcgtcaacacgttcaatgctaacgacaaggtcactgaaaaccaagtccgagaagcaatcatcgatggccttcaagatttcttatttgaaaagacggaacgccatccgatgattttaccaatgatcattcaaagtaatgaataaaacctttaagggcgatacaaactcacgtttgtatcgcccttttttttaattcttatcaaaaatttaggtagtaaaacttgtcatttcccgctataatatacaccgaatatcttttctgaaagggggtatccgaatggctgatacgccacatttttatattattttaaatcaagttgctggtactggccaagctcagaagatttggccgcaaatcgaaactgccctcaagcaacgcggtatttcatatgaattacaaatttctagctatcccggtcataccactcggattgcctaccaatttgcccgttttaaacgaacgaatcaagttttgttgattgtcggcggtgatggtactttaaaccaagccattaatggggtccaaagtgccggtaaacatgatatccccatcgcatatttaccttgtggctctggtaatgatttcgcgcgtggaattggcttaaatagcgatccactacaagcgctcgaacagattcttgcagctaccgcccccgtcaatatcgatttgggtgtctatcacgatgctctcaagaacgagactggttatttcgtcaacaatgtcggtattggttttgacgcttccgtcgtcagtatcactaacaactctaaaagcaaacgcttcttaaataaatgccatctcggctccttatcttacgtcttctcgctaatccaggcctttacatcgcaagatgctttccaagtgaccgtcaaggccaacggatccgttaaaaactttagccgtggttttcttgtcacaaccacgaatcatccttactttggcagtggtgttcccatcatgccttctgcccgcgtcgatgatcaaaaactcgacctcgtggtgattgaaaagttgaacgttttcttcttctgctacctattcatcatgatgctaatgggcaaacacacccgctataagacggttcatcattttagaactgatgatcttgtcattcgaacccaaacgttagaatttggccaagtcgatggcgaagaaatgggtagtcgcgcatttgatatgcacttcaaggtcacatcccaacccttctggctaacaacaactaaaacagaacaattcaaataagcttttacaaattaaagaagaacaacgccatttaacgttgttcttcttttttattacctataaaaatcgtggtttcctttaatttaagccaggataacccagcaattaggctgcccgaaatggcgccgccaaaaaagcgtggtgtgtaaacgaaccaaaataaaccactagcactaccggtaaaccaaatcataacgggataagaaagtaacgagccgattaaacccgttcctaaaatttcgcctgcaattgcccagccaatatgcccgccatagcgataaccaaggccagctaataaagcgccaaaaaaagcccccgttaaggctaaaggtggaatccccagtaacatcattcttaaaacggccgtcactaacgccatcacggttgcataaattggccccatcaacactgccgctgtaacgttcagaacactcgacatcggtgccatgccttcaatgcgaaataacggcgataagacgacatctagtgcaatcatcatcgcaaggatggttaatcgtttcgttcgtctattattcatcgtattcgtccccacgcaaccattgttccttacgataagccatctcccaaaaatgatattccaattggctgctacgaacaaacgcctgcaccattttaacctgatcttccgctgaactggctgcatacaagcgatttaaaacagtgcccatcatttgaatttcatcctgcaattcagccatcgtgtaggtttcaatccagcgttgataatatggattaggtgaagccggctgttgacttaaagccattccgatatcaccgtataaccaagcacatgggtataaaccagccgccgcgatggcggggttatccgcaaataattgccgatacatatgagcaacatagtgatcagttgtcggcgcaatgggcgtcgctcgaacctcagcagccgttatttttaaagcttcaaagaattgttcccgaacgatcatttcaccatctttcaaaccagttgcgcttagtgtcatcaacgcttttaattcttgatcctgacagtgatcggcgacgatttgatgtaactttctgaaatgacgaagataataatgatcttgaatcaaataataccgaaatatttcttctggcagcgtccccgcttgcaattgaacgataaacggatgacgtaaactaccttgccaatatggtgcagcttctttacgaacaatacttgtaaatgacatgttgcccctcctgtacgaattgaaatcaattcacttctggggccacttgacaagcactcaaaatacccgccaattaaaaattgacgggtaccaaaataagcacgtttaatcaacaaacgacacgacatttccctgcgctagtcctaactatatcaggttcaatgggtataatctcagctcttaggcaccccagatgcgttattcaattatggcttcattatagcacggatggaagcggttattcactaaaatcatcatcaagtgactcagtctactgatgattgctctttctccataacaaagttggtcaataaaacaccttgccgtgctacttgttgttctcgaatcacctgatagccccgactttcgaaaaacggtctggctgtaatcgaagcatgcgtgataactcggcctgcaacagcctgctcgagctgatgacagatagcagtcgctacgcctcttctttgataatcggcatggacaaataaccgatcgaggtagccagcttgatcaatatctccaaaaccaatcaggttatcattttcaagtgcaacaacactgaaatgtgattacagcgattgatcccactgctttaaatcaggctcaccagtggcccatacagccaactgcgctttcgtataatcgccagcattcactgtatgcactgtcttataaaacaactctgcgactgcttgacaatcccccggctgatagcgtctaatctccaattatttagtccctctttaatctttttcttcatgtctaattgtaatcgtcatttgtttctcctagtaataattcttttaatttttaaaaaatatctggcttatcggtaaagataagccctcacctcattgaagtttaaaatagggttgaaattccgccggcacttcatcttgtgaaacccattgattggggagctcggccgctgcacttggctgcttgcttgcagtgattaaataacgataatcaatgtgcatgtgggctgcttgctttttcaatgggttatccggaatcttgatcaaattggcatccaccaattgtgcttgctccccgactagtcctgtttcctccaataactcgcgtagtgctgtttgaactggcgtttcagacagttcaacatgtcccgccggtaacaaccattgatgcaagtacggatggcgtaccatcaacaactgattatttttaaatacgagggcactagccgataaatgacattgatcgttgaccgcccgataaaggggccgtttttgttgggccatcaattcactaatcgtctgatacttttgcggatcattaaacgctgctgactgctcagctagccgctgaatttgcgttaacaaatcgttcatgagcgcgccgccattaacaggtctgcttgctgatagcctttgaacaagttaatcattttatgcgttgctaaaacatcgtgcacacgcagaatacgggctccctgttcaatcatcagttgttccaataacagcgttgaggttaagcgttctgccatcggataatcaaatttgctttccataaagcttttccgagaaatccccgccatgattgacgcacgatacttcattgtcggttgaatgctattgagtttaaacagatccagtgacgctgtatttttagcgtgtgaaaaaccaacgcctggatccaaagcaatttgttggcgtgttaacccggccgcctcaagactcgctaacgtctcttggtaaaattgatcgagtatttcaaaaacatcattttgataatggcggccattatacatcgtgaccactgcgggccggtgttgggcgacaacttcgagcttagccggtttatcgaaaccatcgatatcattcagaattggcacgccgcttgcgactgcccgttgcataacatccgcattattggtatcaactgccaatatcgcgttgggccattcctgttgcactgccgcaatcacgggtgcaatccgttgccattcttcatcaggcgtaatttcttgataacctgggcgcgtcgatttgccaccgacttcaatcaccgctgcaccattggccaaatcagcctcaattttcgtcataatctggcctagcgcttgactgggttgcccatcataaaaggaatccggtgtacagttaataatcgcgtagacaattggatcaaccgttaaatcgaacttgaaaccaggaccggtccataaaatctgcttggtacgccagatttgtgtcaattgcacatttggctgaccaaaatattgtgcccatttttgccgtaacgccgctagttgaaaaagactaaattgcccaagccattgttggtccaactgctgaattagacaatgactatctagacaaagccgttgaagcttctcgatttcagctgcatccccactaaagcttaacagcgtatgatttccttgattaggttgtgcttcgctaatttgcatatgatcctccctagctcaaaaagtgttgccgaactgtctttaataaataaaatgaccctacaactaagatgacttgcggtttattccccgttgcaggttgactagccgcccttaaagccgcttcaattgctggatattcaggtgctgtttggcctgttatctgcgtgtatagcgcccctaattcagcaactggtaattgtcggtcatcctgattgatgggggtcgttaaaataaaccgcgctggtagttgcgttaaaagctgcaagcattcagcaaccgccttatcttttaaaaagccagtcacaatcgttaaatcgtaatcgccgtagcgttcttggacactccggacaaactgccgaatgccatccggattatgggcaccatcaatcacgactagcggttccgttgccaggcgctcaaagcggcctggtaagcggacctgccccaaagcacgttgtaagacgatttcgtctaccgcgtgcccttgatcacgacaaaactgccgataccacgtcaataccgttagcaggttctctaattgataggtccccgccaatgccaaagaaaccgttaatggttcacgctctggtaatttaaccgtcacttcttggccagcactggttggataacttgtcacgaaccaatcacgaggggcaatctgaagcggtgctgattgccgcttagcttcagcctctaaaacgtttaaggctattgtcgtttgttcagaggccacaataaccggggtctgtggccggataattttggatttagtcgtagcgattgcttcaatcgtatcgcccaatagtgccatatgatcgagactgatcttcgtaaatagcgtgtaggccactcgatcaaccgcattggttgcatctaactcgccacccaagccacattcccacaggacataatcgacttgttgctgcttaaaatagaccaacgccactaataccaaagtttcaaaatacgataagtccgtcgtcggatcaaagccgagttttttcaaaacggtttggaccgtcgccaataatcgctcaaactgcgcttttgaaatcaactgccggttaatctgaatactttcctcgactgccatgatgtgcggactcgtaaataaccccacggagtagccggatgcttgcagaattgccgcaatcatcgcactcgttgagcccttgccattcgttccgcacacatgaataatcgaaaaagcatgatctggttgccccatcgcttttaaaatctggcgcaagagcgtcacccgttcgtcttcaccatataacatccttggtaattgcgtgaccatttcctcatcttgcatactaaaatcccctatttcaatagttgtagaaattcactgcgtaattggcggtcagttttaaaattgccgctgtaaaaagtcgtatgggtctgactattggccttcttaatgccgcgcatctcaacacacatatggcgcgccgtcacttgaaccgcaaccccatatggctttaatatttgattcaaaatttggccgatatcacgcgttaaattctcctgaacactcaatctttttgaaacgaaatccactaaccggggaattttactcaagccgataatctggccgtttgctggtaaataggccacgctaacctgaccaaaaaaaggcaacatatgatgctcacacattgaataaaacggaatgtcttgcatcatcaccatctgatcattgtcggtctcttcagtttcgaataacttatagtccttaaaaatggtttccccctgataggccaaaacttctccgtacattttagcgactcgttgtggggtttctaacacgccagcacgctcaggatcatcgccaacttgcttcaaaatatcgcgtacatctttttcaatttgctgatttgtttgttctgtcatcgtttacctcttctattcgtttaatcgtctgggtttgatcctgcttcaagacatcaatctggatttcaatcgcagctttttgataaaagtcggccccacagatttctaagattggcactaacacaaataaccgcttgaaggcttctggatggggaattactaacgtatcactttgtaagaccagctcattaaagaaaataatatctaggtccaaagtccgcggtccccagtgaattgttcgttcccgccgacacgcctgctcaatttgatgtaagacaaccaacaactgatccggcgtataatcggtactaatttttaaagcgccgttgataaaatcggcctgttcaactggacccaccggcgcggtttggtaaaaggccgactgccgttcaatttgaattttcggatcagctgtcaaaagggctagcgcctgattaatattcgcctttaaatcacccatattactgccgtaactaatataaacttgattgttcaaactcaaccctccatctcgatttcgacatggtcaaaaataccttcaatcggcaccgcaatcttgcgcaccttaaccgcgactgagccaatccgatcaggatcaagggcgtgaattgcctggataatctcatgagcgatagtttcaaccaaattagcacgtgatttggcgattaattgggcaatcacttcatagaaatccgcataactgactgtatccgttaattcgtctccttgataaggcgtcatgattgccacctttaagtcaatttcaattcgctgccctagatccttctcagcttgaaaaacaccaatatgcgaatgaaactgcatattattaattttaatatgatacatcattccgcctcctaataaccgttctttggctaatattttatcacaaatatacggaattaattcgaataatgacgctaaatatttaaattgacgagatttcgttcataattttcatcattatctcacaattcataaagttgacaatcttaaataaaactgcataaaatgatgtcgttctctcatcattatatatcagcgcatttccccaataaaaaaatactgcctaaccgaaagggttaagcagcattcatatttttaaaaataactaaaaagaacattattagtcacacaattgacttcgagaatcatttaatttaatctatcaataaactgaaagtaggtcataaaatgttattgaatcaattagcaaccacctctgactatgcgctagtccccgatatttgggaacgatccgttttagcgacgcataatttcttacaacctgaagacgtaactttttataaaacacaaattccccattttctggctcaaacggttctcagaatctggtcactagataaccagccaatcgggtttagtggtaccaacggtcaagaattagagatgctatttctcgatcctcattacattggtggcgggtatggccatcaaatcttagactggctaatcaataatcaacagattaataaaattgatgtgaacgaacaaaatcagcgcgccaaagcgttctacttaaagcacggttttacagttgcatcacgaagtcagcgagatagctttgataaaccatatccgattttacatttgacaagataaatagctttctacaaaagaggacacactatccattagatagtgtgtcctcttttaattagaccattttacattgttgtgccacgttctgaccaccaaccattaaacagccgcaaccgaccatttctgccagctgtgcgtccaattgaaccatcacatcatgaatcgttttcagatccgcacgtggttcgtgacgacaaataaacaacggtaaatcgttacgcgtgtaataataactcatctgtcccacaataccaacgcctactttagacaacatgacattgcctgtctcatttaacgttaaagaatactgatcattaattcgtgctggttcaaattgtttcattcaactcgctcctgacattttattactgctaatatcttacaacagaaaaaaattaaataacattcttgacatgcaccttaatcacacgagatttctaaaatcgctccaataaacattgtgagcaattacattgtcccgacttcttgaagatgttatttttaagttaaagaaggaggtgttgaatatgaagactttagacaatatcgctcttaccttattaatcgtaggtggtttaaactggctacttgttggtttatttaaattcgaccttgtggctatgctatttggcggccaagcagctattatttcacgaattgtttatgtcctagttggactaagcgcgctatactgtattaaattatttgctaatatcaataacatggcacgttaataacctaaaaaaatgccctcaaatgagggcttttttgatggctacattaaaagttttaggtcactagcctttttttattatcctacagacccttccatttcatagctaatcaatcgattcaattccaccgcatattccattgggagttccttggtgaatggttcgacgaagcccatgatgatcatttcggttgctttggcttccgatataccacggctcatcaagtaatagagttgttcttctgaaattttagagaccttggcttcatgttccattgagacatttccgtttaagattgtattatacggaatcgtgtcggaactggatttatcgtccataataatcgtatcacattcgacgtgggcaaaagaaccgtcactgtcgcgttcaaaacgaacagtgcctcgataatcaacggcgccaccatctttggcaatcgatttcgaaacgattgatgacgacgtatttggtgcggcgtgaatcatccgggcgccactgtcttggtcaacgccttcgccggcaacagcgattgatagcattgtgccccgtgcgccttcgccatcgaggtagacacttgggtatttcatagtcattttagaacccaggttcccatcgacccattccattgtcgcattttccatggcttgggcccgtttggtttccaaactataaacattcttcgaccagttttgaatcgttgtgtaccggcaataagcatcccgtttaacgaagacttcaacgaccgccgcgtgcaagctatcacttgaataactgggcgcagtacagccttcgacgtaattcacgctggcaccttcatcaacaacgatcaatgtccgttcgaattgacctgagttttcagcgttaatccggaagtatgattggattggaatatctgtccgcacaccttttggcacgtagatgaaggtcccaccagaccaaacagccgagttgagcgctgaaaatttattgtcggttggtttaaccaaagtactgaagtattccttcacgatatcgggatattcgcgcaaggcagtatccatatcggtaaagataatccccagcttttcaaattcatcgcgcatattgtggtaaaccacttctgattcatattgcgcacttgaaccagccaagtatttccgttcagcttctggaacccctaagcggtcaaaagtatccttgattttatcagggacatcttcccaatcgcggtattgtttatcagttgccttttggtaatacaacatatgctctaaatcaagaccggataaatctgggccaaaatcgggcattggcattttttcgtaagcatgaaatgattttaaacggaagtctaacatccattggggttcttttttctcgtgcgaaattgcacgtacaacatcttcagttaagccccggccggttgaaaagacgggttcaacatcatcgctaaagccgtaatcatagttctcaaattggggcatcgtcgtctcttctgtcattaatctgttccctccgtttctgcatggttcacaatttgacccgttgtcgctgtgttggtatcgctattgagcgctttgtggagcgccttccaagcaagcgtggcacatttaatccgcgctggaaattgttgaatgccctgcaagatggccgcatcttctagaattgtccaatcttcatcgcgatcaccaatcaccatgtccgaaaagcgttcgatcattacttcagcttcagcaggtgtcttatgcaagaccgcatcggtcatcatgctggcagaggcttggctgattgtgcagccttcccctgaaaaagcaatctggctaatccggttatcttcaagcgcaatctccaactgcaacacatcgccacaagttgggttacgtaattcaatttcatgatcgacagtgtctaaatgaccgtgatggtgcggatgttgcgaatggtctaagatgacctgtcgatataagttgtctaatttagagagtgccattttggaaaaactcctttgctgcttgaatcgcggccactaaggcttgtacgtcttctgacgtattgtagaggtagaaacttgcgcgagccgttgccacaacgtttagccactgcatcagtggttgtgcgcaatgatgcccagcgcgaacagcgaccccttccatatcgagggctgttgctaaatcgtgcggatggagattatcgagattaaaagcaatcacaccggttcgctgactagcttcttgcgggccataaatcgtcaacccgtcaatcgcttgtaaggccggtaatgcctcggcgactaaagcctgctcatgtgcctggatgttggtcatcccaatctgattcagataatcaatcgcagctcctaatccaatcgcgccagcaatattgggggttccaccttctaagcgccaaggcagttctttgaaggtcgattcttgtaagccaacaaaatcgatcatctcaccaccgtattcaacaggtgataattgttcgagtaaggcctgcttaccatacaagacaccaattcctgttggccccaacattttatgccctgaaaaggcataaaaatctgcatcgagcgcctgcacatcaactggcatatgtgggacagcttgtgcgccatcaacgaccatatagccaccttgtacgtggactagtgccgcaatcgtcttcactggattgacaacgcctaaaacgttagaagcatgcactaaactgacgattttagtccgtggaccaatgacctgcttagcagcgtctaaatctaactgaccatctggcaatagatcgatgtagcgtagtttggcccccgtctttttagcaagttgttgccaagggactaggttgctatggtgttccatatagctaatgacgatttcatcgccagcttggacaactgttggcccaaaactaccggcaatccagtttaaactctgcgtggtgccttttgtgaagacaatctccgctgaagaagcggcattgataaattgttgaactttaactctagcagcttcgtattgcgcagtcgcccgttccgccaacgtatgcacgccccggtgaacattggcattatcatgttggtagtaactcactatttggtcaatcaccgcttgtggcttttgcgttgtcgctgcgttatccaaataaaccaagggttcatcattaaccaattgttctaaaattggaaaatcttgccgactagtgttcagacttttgcccatcaattaacttcctctcgatcgtgtccgttaattgttgacgaacatttttgtccggaatttcagtcaggacggcgcctaagaacccacgaatgactaggcgttgtgcaacttctttagacaagccccgactcatgagatagtacatttgttgttcattaacacggccaacactggcagcatgaccggcttgaacgtcattttcatcgattaataatagcggattggcatccccacgggccgttcgtgataacatcaaaacccgattttcttgttgtgcatcagcacccttagcgcctttgatgatgtgcccaatcccgttgaaagtcagggtcgcatcttctaaaataacaccatgttgcaagatatggccgattgaacgcggcccaatattcgtcacccgcgtatcgattccttgaatttgtttcccagttgaaatagcgaccacttttgtttcagcatgcgaaccatcgccgaccaaatcagaatcaaagtcgccaatgatattgccgtcattcatgaagcccagtgcccaatcaatccgagcatcccgcattaagtgcccccgacggttcagataagtcgtaacagacttaccaaacgcatcaacagctgagaaatgcacgtgactattatccttggcaatcacttcaaccaccatattagctaggttcttgtgatcacccattgtttgtagattttctagatagctaaactcactgttttgttccgccacaattaaaacgtgatgaataaaatcagtggcctgtgtgctatcttggacataataagccgtaatcggttgcttaatcaccacattcttcggcacgtacaagaacatcccactgttcatcaaggctgtgtgaaaggccgtcaaacgatcttcatccggtttaaccgtcacttgcatatagtattcatgaactaattcaggatagtcttgtaaagcagtgaagatatcggtaaagatgaccccttgctctgccaattcactaggcagatttaatttggcaattgtttgcccaacttgcacgacatagggttgatccgctgttaaatcagcgaccatttcgggtagtgtatcagtcgcagaagttgttaaagtcggcgcactcgcagccataattggccaatgtttgtaattaatcttttcgaaaataggtaagtcgagcttttcaatttggcctagggctgtttggcgtaaggctgcaaaccaatctggttcttgatgggcaattgaaaaagccgcaacttgttcaggtgtgatggctaatttctttttcatcaaagctgccccctatttactttcatcgtcagttaatttaatgtctaaccctaattcatcacgaataccggcgtaaccttcgtcttctagacgtttggccaatgatgcatcaccagtcgtcacgattttaccgcccatcatgatgtgcacgaaatcaggcacaatgtagttcaataaacgttgataatgcgtgataatcaatgaaccgaagttatcgccgcgcatttcattgacccctttagaaacaacttgtaaggcatcgatatctaaaccagaatcaatttcatctaaaatagcaaatttaggttcaatcatcattaattgtagaatttcgtttcgtttcttttcaccaccagaaaagccttcgtttaagtaacgttcagacatttcttctgtcatatctaagacagccatgcgttgatctaattttttcaagaaggccatgattgagatttgatcatcctcagcccggcgcgcattgatagcagcccgcataaattcagcgtttgtaacaccttgaatttcagatggatattgcatcgctaagaacaagccagcgcgcgcccgttcatcaactggcatttcaagaatattttgaccgtctaatttaatttcaccttgaagcacttcgtatttaggattacccatgatggtttctgaaagggttgatttcccggtcccatttggtcccatgatggcgtgaatctcacccgtattcatttctaagttaacaccttttaaaatttctttaccgtcaattccgacgtgtaaatcgataatttctaatttagacattactgaccctccaaaaatcgcattatagcacgttgttgctgacttaattctaagctaaatgagaacgcttttcaatagtcgaatcgtgaaatatcaatcaaggatatgcattaaatctaataaaaaagagtaccccattaaaggtactccccaaacttaaattaaaagaatttacgataattattgtgatcgaactactcattgatttgatactcttctaaaacttcccggcaacactgatgtcctgacagggggttgaactactcattgatttgatactcttctaaagcttaagtcgctatctatttgtattgttctaagttgaactactcattgatttgatactcttctaaagcaccacaagaggactatattcttcaagcagagttgaactactcattgatttgatactcttctaaagccgttaacgataccatgttaggcttgaaaccgttgaactactcattgatttgatactcttctaaagcttgatacaattcgctatttgatacgattatgttgaactactcattgatttgatactcttctaaagcacaaagggaccattattcgcactactcgcggttgaactactcattgatttgatactcttctaaagcctcggtaacccgtactggcatctttaatcagttgaactactcattgatttgatactcttctaaagccagctccacgccctatcaatactagaaattgttgaactactcattgatttgatactcttctaaagccgagcaaataatcagtcgaaacttttagcagttgaactactcattgatttgatactcttctaaagctatattctgtcccaactaccacagggatatgttgaactactcattgatttgatactcttctaaagcctagcaagtagtctgtagatacacctaaaagttgaactactcattgatttgatactcttctaaagccggtaatgccaccgtaatactctagcgtaagttgaactactcattgatttgatactcttctaaagctgtcaaacaaagctaaataatcttcaattagttgaactactcattgatttgatactcttctaaagctggtatgaatgacgggacaatctttccaaagttgaactactcattgatttgatactcttctaaagctgccaccgatacgctatatttatttcttttgttgaactactcattgatttgatactcttctaaagcatattctacccgtgacgttctggggcgttagttgaactactcattgatttgatactcttctaaagccaaggcatatacaacagcactcacgttggtgttgaactactcattgatttgatactcttctaaagctgttataagtataaatatcaacaacgttatgttgaactactcattgatttgatactcttctaaagctaaactgatatctgacattttattttcctcgttgaactactcattgatttgatactcttctaaagcatgggttcttaccggttcgcccataacaaggttgaactactcattgatttgatactcttctaaagccaacaagcgccatgcaaaaagcaatggaaagttgaactactcattgatttgatactcttctaaagctacagttggggccattgaaaagatacaagcgttgaactactcattgatttgatactcttctaaagctcattacttaattacctccgggtttaacaagttgaactactcattgatttgatactcttctaaagcgcgttagttgataaagtgaatgcgtatatggttgaactactcattgatttgatactcttctaaagctagaattgcttcattatctacagttgttaagttgaactactcattgatttgatactcttctaaagccagttgtttttatcccaaatttttcaaaaggttgaactactcattgatttgatactcttctaaagcccttctgcgttaatcgttgccgcgattagcgttgaactactcattgatttgatactcttctaaagcttaaagccattgtatctcctcttttctaatgttgaactactcattgatttgatactcttctaaagctagtacgattgctgcttcggctccgcaaatgttgaactactcattgatttgatactcttctaaagcattaagcgaagcatttaaaattgctaatttgttgaactactcattgatttgatactcttctaaagctgtattcggtctcttcattatcagaaatttgttgaactactcattgatttgatactcttctaaagcaggtttttagtgtgttaccactggatttaagttgaactactcattgatttgatactcttctaaagctgaacaagatggttctgataatgcgttttggttgaactactcattgatttgatactcttctaaagctcagctcatcactctcataatcgcgcatgggttgaactactcattgatttgatactcttctaaagcataacacgatggactacgcgcaaattgaaggttgaactactcattgatttgatactcttctaaagcgagttcagatggcgtatatgtttgcgtcgtgttgaactactcattgatttgatactcttctaaagcccatagacgtattttcagcacgcttagtgggttgaactactcattgatttgatactcttctaaagcaagtgtcccttataaggctcaaaaacgcgtgttgaactactcattgatttgatactcttctaaagcttaccaaagagatttttagataagtcttgtgttgaactactcattgatttgatactcttctaaagcattgtatcaccaacaccatcacgagctgtagttgaactactcattgatttgatactcttctaaagccgaccaagggatcattgcggttgataagtcgttgaactactcattgatttgatactcttctaaagccgatgttttttcatcaaatactcactttattcgtagcgccattcaacataatcattatcaatgtgataataacagcattcttggtacctgtcaggcgttgccaattctgaaaattcaatgataaagagtttcacatccaatgtcgcaactagtcttaccagttcattaaactggttgatactaagatagtgcgaaacgttgatcaacgtgataattcttgtttcttgtaactctacagcagtttgtactatgctttctattataccatatggatcatcttgaacatcattcgaaaattttaaattgcaaaatttaattaacttttgcaaatctaactcatggtcaatatctaaagctaattcatacataaacgtggcttctaaaatagtggctcgtaattcattattcagattaactaccttttgtcgttgttcatccgttagatcggctgtaaattttttgatcaacttattttgaaaaagatgatttaaatcaaccgctgaaatttcaccaatccaaatcatccctttgatatattctagtaaccgataatggtcatcacttaaatgaagtgtatcattttgaccagaggcccctgcgattaatttagtatatacagacggactactcgtgctcagaatcgttattttactattgttaactttaaagggttcatacggataataagtaatattcataaaattaatgtcctttcggctgaattacgtatatcatcactagactttccaactaagaaatgcattttattatactgttgttctgtcaccatcagggtctggacaagtccagctgcaggtatgtaaccagcaatcctattctcaatatactgagcggactgcttactaacacaaactcgcacataaacagaatattgaatcatcaaaaagccctcattaagtaatgcctttctaaaatggcggtaagcttttcgatcctcacttgtttccgtgggtaaatcaaacatgaccaataatcgcattattcggtacctcatttgtcataaccacccttacttcaaactcattctttggattcgccataaaatttaaacagttttgtacgtgtttagtgagtgcattcctaagaatcgttgtttgtccattgtattgaagctcgatattcaaaagttcaattagtccaaatttaatatccgttgtcaattcattaaaatgctgatgtgctatccaataatcgaagattggtcgaaacggttccattaaatctgaacctaaattaaaatcactaacgccactatggtgatggataccaaactgcgttaaataaccattacatacaatctcacgattaaccgctgataataaaatactataaccataatttaaagccgcattaatcggattaaattcagttcgtacaaatgttttatcaaaaattaattggaaatattttcgagcaacgactgcttctcgattacttagatcatcaaattcaatggcacgtacctccttctctaacgtcgtcacttcttttcccaactgtcgagcacattgaatctgcattgcaattttcgctttaacaatttctgtccagaccattccacgtaattccgttggccattcaacttgctttttaatagagcctaaactgcgattaccaggataatccgtcatcgtttcacagcttggattaccatctcgtccggtaaaaataacttttgctcccgattcactcaactcggtaattgcagaggcggtaattactgcctgagtagttgccactaacaaaatctgaacatcatcgataggtacttgatgtgtggcatcttttgtttgtactacaattttccgtcctgaatatgatacttttgcatgttgagaaataacgactgttcgccatcccatagaaacgcctcctaatttttgcttcatacttgttttaaaccttaatgcatgctataatttcgttgttgaacttgatacactcaaccgaaatactcattgatttgatactctgagttaaaatcaaacaaggtcttttgaccaagttttctattctgagcctcttatgaggccttttttatgccttcaaaacaaaaagctagcctgtcatcgactctaatgacaggctagcttttatattataaatcccttaaagcaactcgtcgttcaaataagccagttggagattgatagataatttgtgtattgaaaaataatgtgatgccactaggttgttgtaacattccaaatggagtagttatctttaaagtctttagatcactcatcgctgcatttgcatgcaatccaattaagatgcgatctaatactgtttgttggcccacatgaatcaatttattaccgtcccatttgttcttccacggtaatttgatgaattgttccttacccatcttcaactttgttctaaattgattggtatcatacagtgggaagtatctcatcacttgttttaaaatctcatcataaacttgcagtgctaatgtttcggcctcaactaacgataattgaccatttaatagtttaactgcccttttatttagcattaattcttgttcattatgcttataggttgctgatcctagagttatttcttgtccattatcataaaaccgttgattaattaataccctaggaacaatgatttcaaaatcttcggtaacttgaattgtttttcctttttgtttcttattcttcgtaaatttaggcatcaattttgccttaagactagctaattgttcattagcatcagatagtctctccaattctgctacccaactcgtctcaacaccacaaaccttatacgtatcttcttttttagacttaatccggacaatacacatataagcaaccgtcttgcccgagtaaccaccatataatgcagttggccggtcctgcttggcaggaatcaactgtttaccaccttgaccgctagccttatcgtctttagcagaatacagcgtttggttgtatagtgcacctgtattttcatggacttcacgggtcactaagattttcttaaattgataaattttatccaactcagcaagtccttgcgctttattccagataacctcgtgagaatctgaatctattacttcttccttttttaaatcgttaaggaaattaaaattacgccacttatcgttggtattattcttttgatagcttccataaacaaaaaatggcgttaatttagggtaacgtttaagaagatagattcccacaaaagccgttaaataagcatcaaatgcatggtgatggttatttaaatttctatttttaggaaaatcaaacatctcacgcatttgatgtgtcaaaccacttttaactgtaatcaactggacctcatcatcttcataatgatccattaataagttagttgctaacttaatcacttgtcgtgtttcaaccaattgtcgattgataaaccccttcatagcatatttactaattcgatcgggatttaacgttaaattatcatattttcgtttagttattaatccagctcgtaacatttgttcccattgaacacgcatttttgagccaaatcgttcttcagtatagtcatttaacggtacttgatcagatttgctccgattcatttttgcagataccaaaacccgattatctaaagaattatctttaatgaaggcttgcggtaaaatatgatcaatatcgtattctgataagcgatcaatatttaaagtttctccagtatacatatcacgaccaccctgcataaagtacaagaataatcgcgtatttgctaatgctgtgttagttaaatcctttaattccgccttaacatcagaatcactaaggatatccttactaatattttgataaacttgctctacttgccgtttccgttgaacagataaacgtggatttgcctcatcctcacgggcaaactcaattagaattttacttggtgcttgattcttcattgctttttgaatatcagataccactaatagaatttggcgtaatgcctttttattctgaggtgacgtatataaatcattaatcacatcttgaacatcatttttggataataacgtttggttagcagcactaattaatttatcgaattcctctgaatgaacaatccgcataaaattgtctgtcgtatcccacaataaatccattattctctgaccgttttcattaacaatctgatttaataatttattggaaagacggccccatccccgataacgtttagaagataatcgtttccgctgttcatctgttaaccattcaatttcatttaatttttcgacaaaaattttaccatcttcaaaaattgttgaccattcaacacatttttctagatcagcttgtttgttggcttcatcaacaattccgcccaagattgccttcaaatcatggtacgtactcaacctactgataaccttattttcatcagataatcccgtaatttcaggccgactagcaaaataacccttcgaaaccaaataatcttgaatatttttaaccgaaacacttgcttgcatcatgaacaaatcgttaaaaatccgttgcttttgttcaactgtaatcggtacatcatcaatcttaataccgtttaattcgtttagcacttcaaatcgttgatataccaaactttgtttaggtaaaacatcttctgccaataaataggtgtcagtggttgtcatccgtttaataaattcatttgccgatgcttgtcgatccactttttcatcaaaattccacggtgtaatcttaccctctgcttttcgaatcatccacgcaaattttttattcgaactttgttgttgctgttcagacgtgatcaatggcccaacataataaggcactctaaatgccactaactcatccaatttatacttagcaattttacgccgactttcgttaggattaagttctgccaaccaaggataatatttttgttggttttcaataatccgctctagctcttgttggtgcaactgatgtgggattgcaccattatcttttgttcgttgctttggcataaattgttcaagttcgattaactttagaatttcagcaatcgtttcgttatcctgatatgatttcaatgctttagtagttgctgcataaaaatcttctctgctgtaagctttagcattatcttgcccatcaatataataattgtaggcctgttgaattgcttttttatcagaaatactcaacagtgggtagattgactttaattgctttaaatgagcagcatgctggtcatatttttcgaccatcgcttccgataatgattgattttcaggtacaattcctgctaataagatacccgaataaaggccctgcaggattgctattatttcccggctgtcatcatcaatattggttgctaccttatcaatatcttcatcgaaactttcggagttaaatgataacgtccatgacttcgcatcatcaacttcaattccggttaggacgttaaattttgcttttaagcctagaatcgcttttaataactcagtggcaattgccttattttgcttctcaagtgatttgttttcgtttggaacataaatcattcccaatgcttttttctgtcgattactagcactttgttggtcatttagcaataatgccttcaaatcatcaaaatcatttacagctaatttgaacatcgattcgttaaaccgttcgctaaatatttggtttaaagtttcaaaattttcagctaatttaatttcactacttttaaatgatgataccggtgattcattcaaaaaatgtccccgatatttcacaatatgatgcgttgctaaataaatttctctaatatcaaattgcttattcttagtcattaaatcgcggcgcagatgataaattgttgggtattgtgtataaaaatcagtatccgttcgatcattaaaaagactcatttctggatataatttacgattatcctttgagcttagacttgattgtttctgacgtaagaaaaatgtgttatcaagcggcgtgatttgtggttcaaaaatttctcttaataaacccaatcgccatttacgccgttttaatctacgacgtgttgttcgaaaactccgacgttcttcggctgtttttccttcatcatataatcgaacaccataaccgtactttcctttaatactcattaagtggttctggtcatcaacgactgcccacccaattgaatttgtaccaatatctagtccgatattatatgttttcgccatactaactcccccttaatcgccattactgttagtatagctaattaagcgcttattttccaacttaattaaattatgcacaataaaaaaagcccatccatatgagcccttccttcattatttaactggtaataccgctccgtgccattgctttttaatccaggcttgggttgattttgatttgagcgctttgattaatttcttgattgcaggtttgttttcatcacctttattaacggcgacgacgttcacgtatggtgatgagaggctttcgattgcgaccgcatctttttctggtgtaaagccggcctgaactgcatagtttgaattgatggcaaccagcgtgccttcatcatttttcaacaattcaggcattaacttcggctcaaacgtgtacttgaatttgagcttcttcggatttttggcgatatcattaaaggttgcattttcaactttgacccctggtttcaaggtgatcaagccgcccgtttttagaatcgagaggactcggccccaatcagtttgactgtttgaaacgaggacagtggcgccggttttgacggcacttaattttttaactcgcttgctgtaaaggcccagtggttcaagatgaatcccaccagcactcactaaatgatagccattatcgtggtttgcctttttcataaacggaatatgttggtaatagttggcggtcaattcaccgctggctaaagccttattaggtaatacataatcactgaacgctttgacatccaatgtgatgccttctttttttaattcgggtttaatgtgtcttaaaatggcggcatgcggaatggttgatgcgccaatcacaatcgtattgggatctgtttttttagcgcgacagccagtcaacagtacgccaacaattaaaagcccggcgagtacgcttaaatatcttttttgcatctacttttctccctctgttttaacgatgatcaattttagcgatgataatgtcaccggctttttgacaaatgaacacgatgattaaaataatgattgtcgccactaacgtaattgtattttggtttgcttgaaagccttcagtgtaggctaagttccccaagccaccggccccaatcacaccggccattgccgtgtaaccaagtaatgaaatcgcggtgacggttaatccggaaaccagtgcgggcatgctttctggtaaaaggacttgccagataatttgccattttgaagcgcctagtgcgcgggtcgcttcaatcaccccgctatcaacttcacgaaaggctaattcaactaaccgcgcataaaatggtgctgccgaaacgattaatgctggaattgcagctttgggaccaatcatggtacccatcaattccttagtcatgggaatcaaaagcacgatcaagatgatgaacggtactgaacggaaaacgttgacgaataaagcgacaatcccatttaacaaccgactcataaaatccattttaccgtttgtttgatataaaactaaccctaacaagaaaccgagaattgcgactagcaagacgctgacagccgttagccaaaccgtttcgactgttgcttcccacatcgttggccagtcgatttgtttaaattgaaaataagattgaaatccgttgatattagccatgtcttaacacctctacttcgatagtttgttgacttaagtcggataatgcctgttttaaatcgtctggactagcttgaatctgaatatataaataccccagggcaccattaatcgtttgttgtaaactgccactaatcacgctgacttcaacgcttggatagcggcgcattaattggccgatgaccggttgactggattgttcttcgttaaaccggagtttgacgatcgtgccctctggtacccgcgtcaacaactgttcgattgaagcggctgtttcactaggcgtaatcaccaatgattctgagacaaaggctttcgtcacttctgcctgtggcgtttcgaagatggcttgtgttgtgccttcttcaattacccgaccggctgccatcactgcgattcgttggcagatccggcgtaccgcatccatttcgtgggttaccagcacaatcgtgatgcccatttcctgattaatcttagctaaaagacttaaaattgaattcgttgttttaggatccaaagcactggttgcttcatcacataataagatggccggttcgctgattaacgcacgggcaatcgcaacccgttgcttttggccccctgaaagttcgctaggataagcggcacccaagtctgttagctcaactaatgccaacatctctttggccttagctaagcgttccttcttgccaacccccgctaatttaagcggtaaggcgatattttcaagaattgtttttgaccagagtagattgaagtgttgaaaaatcatgccaatcttctgccgaattggtcgcattgcttgttcgctcaaaccaacgattgattgaccgttgaccaagacatccccgctagttggtttttctaaaccgtttaataatcgaattaacgtactcttaccagcgcctgaatagccgataatcccataaatttcacccgcttcaattttcaatgaaatatcgctgagtgctgtaaatgtctgttgttcccgttggtaaaccttaccgacttgctttagttctaacattgcattctctccctttgactaaaaatgtacaaaaaaagtcctccctctcaaataaatgagagaaaggacgccaatttgcgtgttaccaccttaatttcacgactacttcacaataatcgccttacaaagtaccaggatcgatactcgttcgctatatcgggcaacccccgcattcggctcagttaaaccttaccaaatgaatttgctcaaagaccatattcgaaaatcgttcgcattatccgcttgcacctgaccggactctcttaaaatgctactaagttatctactcatcttttcatcgcttgtattaagtaattcttatcttaattaatcagacgccagatgtcaagtctaattatctgaaattcgaatatcggcaatccacgcatctttttcattatccgcatttaataattcgggattatcagctaaatcagtattgacgttgactaattcacccgctaaaggactatctaactcttgaaccattttttcagcttcaattgcaacaagtggcatatcaagtgccatcttttgcccttcaactgggacatctacaaatttaattaacccaaattcattttgcgcacccttagtcaaaccaattcgtctgattgaagctgcgatttcttctgtccaaaaataatcattgttactcattgtcaattgttttcactcctagaaagtatcttcagattcgctgaacatataactcttataatggtaccgcatcgacatgataaaaccaatccccatcatgttccccaatagcgatgaaccaccttgtgaaataaacggtaatggaataccggtcaatggtaatagaccaacactcatcccaatattttcaaaaacatggaaaaggatcatcatgataacacccgttgaaacataggcataaaactcatttttggtatcaaatgtgacccgaatcatttggtagatcaacaagaaatacaataaaatgactaaacaagaaccgatgaagccgaagttttcaccaattacggagaaaatcatatcggattcacgaacgggtacgttaacctgaatctgattgaagcctttaccaaataattgaccagacccgatggcctttaaactttgggataattgcaaacttgtgctggccgtattatcaaacggatgtaaccaggcatcaattcggttaaattgataggttttaaagcctaagtgggttaaaatcgcccgccctggggttgttaccgccaaggtcaaagccgtcccaccaatggccgccattatcgccattgcaggtgctagaatcttccaagtaatcccggacactaagataatgccacccaaaattgcgacgaacaccaataatgtcccaaaatcattttgtaatttcaaaagtaccataactggtaatgtccaaattaataatcggcctaacaataaccaatccgcattaatcgtgtgttctggatactcggtattgtgcttagtgacaacccgactcatcattaagatataagccggcttcatcacttcggaaggctggaacgaaatcggccctaacgagaaccaactcttagcgccagtttgaatcgccactacccgattataaaagaataaaacggcaactaagagaaaaatcccaatgccataagcaatcggcgcaactcgccagagctgttccgaatcaaactgcatgatggccacaattgcgatcccaccaatgacgtaccaagccgcctgcatcagcacagctcgcgttgagctggcactacttgtatcatgcgttaccgcgacataaatcgacattaaacccactaacgctaacatgaagacggaaaaaacaatcccgtaatctacacgcgaagtatcgtcgactttttctaattcctttggcatgttaagtctccttcaactaaaaactgtcttaattataaaataacccggccaaaaatctgccgggttactctaaagctaattaattcttaagaattaaccttggtgtaagtgatactcccgtagtaattcgttaacagcatcgtcgtgtgttttagtaatgatgctttggccagtaccttcgacagttgcttcgaaccgttttttagcactgtcttcgacaataacaccgacttcatttttaccaactttgacactcgtcattgcctggccgttacggttaatatcatcaattgtgacttctacgcgttgttcttttttagacatattttttgaaactccttattttgtaacattagtcattaacagacttattccgaaacactgtgaaatggtccggaacgggatcataaccaccctttacaaatggatgacaccgcaaaatacggccgatacccataatcagtcccttaatagcgccatgcttttgaatggcttgaatcatataactagagcaagtcggataataccgacagctcggtggtaagaatggcgaaataccagtttggtaaaaccgcacaagtgcaattaatatcttttgcatgcaatcaccacttatcttgacctactgcaagaaattaataatgtgactccaggtacttggtaaaaagacggcaaatgggtttcgaccacccattgcaaaaccaatcatttggccaattaacccagcaaaaatcattaaaacaatgactagtaagatctttttaagaactggtttgacgtgctcttcaaaatttgatcgatacacaatattcacaatcccttacttctgatttagtgtgctcgtttttgggcaatattttctaataaaacacccgtacctaaggcaaccgcgtccaatggcttttcagctaagacaactgggaccttaaggtgttcagaaaagaggttggcaatattgcgtaatagcgcacccccaccggttaacataatcccgcgatcaataatatcgccggctaattctggtggtgtcacttcaagcacttctttagcagcggcaacgatggccatcattgtttcgtgcaaggcaagttcaacttcatccgcaccaatcgtgattgacactggtaatccaccgacaatatcacggccacggacttctagttgttcacttgcatcggcgtgccaaacactaccaatcttcaacttgattgtttcggcagtatgttcaccgattaataagttatgtttacgtttaacgtatgctgcgatttcagcattcatgcgatcaccagcaagccgtaatgaacgacttgtcacaacttcacccattgatagtacggcgatatcactcgtcccaccaccaatatcgatcaccatgttaccacgtggttggaaaatatccatcccagcacccacggccgcaaccttaggttcaaattctaagaaaactttaccgccgccagatttttctgcagcttctacaattgccttttgctcaatcgatgtaatatttgttggacaacaaattaagatgtttggttttgatagaaaacctttgacgtttaatttattaatgaaataagcaagcattgcttcggtcatatcaaaatcagcaatcacaccatctttaagtgggcgcactgccaaaatattgccgggtgtccgaccgaccatgctgtatgcttcagaaccaactgctaatactttttttgttttagtatcgatcgcaacgactgaaggttcattaagaacaatgcctttgtccataacgttaattaagacgttggctgtccctaaatcaattccgatatctttagccatttagtgttgctccttccagaaaccatattcaatagtcaattataccacaagcctaatatcaataaaatataagtttcgtttacgaaattaacactaaaaaagaatgacgtccgtctaaaaacgaatatcattctttaatcactgctaattaagctaatttttgagttgttttacgatgaccggcttcatcaaaatcagcacgactgatatgtgcacctaatgcccgtaatttttgatggaagtgataataaccacgatccatgtattgtaagtttgtggcaagcgtctcaccattggccgctaaaccagcaatgactagtgctgctgctgctcgtaaatcagaagcggccacttcagcacccgttaattcagtaggaccgtataagatgacagattggccttcgatttggtaatcggcattcatacgtcgtaattcttctaagtgcatgaaacgattctcgaagactgtttcagtcatgacactcgtcccatgagccatcaattgtaaagcggtcatttgtgcttgcatatccgttgggaaaccaggatatggcaaggttttgatattacttggtttcaattcatcagggccgataatccggatgccattttcttcctcgatgacttgtgcgcccatttcagctagtttagacaataaaggtttattatgttcagaaatagcttcttcaactaaaacattacccttagtagctgctgcggcaatcatgaaggtccctgcttcaattcgatcttgcacaatactgtgttcggtcccctttaattcagtaaccccttcaatccgaatttcttcagtcccagcaccgaaaactttggcgcccatcttattcaagacgttagctaaatcaacgatttctggttcgcgggcaacgttttcgatgactgttgtgcccttagctaaggttgctgccatcatgatattttgcgttgcaccaacacttggaaagtctaaatagatgtttgcaccgactaattggtcagccttggcttctatgtaaccatgactttgtgtaatcgttgcgccgagtgcttcaaaacccttgaggtgtaagtcaactggtcttgaaccaattgcacagccacctggcatggcaactcgggcatgacccaatcttgctaataatggtcccatgacaacgattgaggcccgcatctttgaaacatattcgaatgccgcttcaaagtttagtggttgattggcatcaatcattagatagttacgttgttcatcaaatttaacacgtgcatccagactcttcaaaacatcttgcatcataaaaacatctgataagattggcacgttcgttaattcaactggtcctttagaggctaaaagtgccgctgccatgattggtaagactgcatttttagcaccttcgatgtggacatcaccaactaatggttgtccgccttgtatgatcaatttttccaagagtttccctccgatatgactgctaatttattggactaaaaaaatgatattgcgcgcttgcgcgataatttctaaaaagaattggctcactaaataacccattacgatggctgtaaacatgaggacaatctgaatctgtcgaatatgattcggtttaaaaagctgttcaagtcgtaaagactgtagaccgtaaaaactaagaacgataaagccgatatgactaataatggtaacaactgcttgtgatccaattgattgcacttcaataacgcccctctatgaatggatatagggacattgtaacacacagaaaagtcccttgtctgtatttagccgttttcttaataaaagaagattggattgtattataacacaacaaaaaagcccccacgacttttgccgtgagggcttcttgcaataactattgtaaatgatttttgacgtcaatccggttcatcgcgcgttgaagtgcgatttgagcccgacgtaattcgtctgaatcatgtttttctgaagccgtcttaatagcgtcttcagcacgttgtttagcacgttgggcacgtgataagttaatatcgcgcgcacgttcagcaccatcagcaacgattgaagcgatgttatgactcacttccataaagccgccagtaattgcaatggcgtcttcatgccctgggttatccgtccgcttaacacgaatttcaccaatttctagaggggtaataattggctcatgattagccataataccgagttgtcctgccattgctggtacaaccaacattgaagcatggtgatcataaacgacaccatccggcgttacgatattaacggttaataccttttgctcttctgccatcattaacgcccctttctagtcttgatcgacagccttttcagactgtgtatagcccatttcttttgcctttgctaatgcagcgtcaatgttcccaacaagacggaatgcttcttctgggacatcatcatagtcacccgcaaggatggctttgaaaccagaaacagtatccttaactggcacgtatgaaccggcttggcctgtgaaggcttcggcaacgtggaagttttgtgataggaagaattgaatccgacgagcacgtgcaacgataatcttttcatcatcagataattcatccatacctaagatagagatgatatcttgtaattcacgataacgttgtaagacgtgttgtacttcagaagcaacttcgtaatgttcttggccaacaatttcaggatcaagcgcactagaagatgattctagtgggttaacagcagggtaaataccttgttgtgttaacttacgatccaagttagttgtggcatccaaatgcgcgaaagttgttgcaggcgcaggatcagtataatcatcagcaggcacataaatggcttggatagatgtaactgaaccttttttagttgatgtgattcgttcttgtaattgacccatttctgttgccaatgttggctggtaaccaacggctgaaggcatccgtcctaatagggcagaaacttctgaaccagcttgcgtgaaacggaagatattatcaatgaacaatagcacatcttggccttcaacatcacggaagtattcagcaattgttaaaccagtcaaggcaacacgcatacgtgcaccaggtgattcattcatttgaccgaaaaccatggctgtcttttccaaaacgcctgattctttcatttcaaagtataagtcattaccttcacgtgttcgttcaccaacaccagtaaagacagaaataccaccatgttcttcagcgatattatggattaattcttggattaagacggttttaccaacaccggcaccaccgaacaaaccgattttaccaccacgcacataaggggcaagtaaatcgataaccttaatccctgtttctagaatttctgaacttgtatttaattcctcaaatttaggcgcagaacggtgaatactgtcgcgtctaaaatctgcaggaaattcttcgccgccatcgattgtttcgcctaagacgttgaaaacacgtcctagagtttctttaccgactggtacgttaattgcacgtccagcatcttcaacaggcatgccacgacgtaaaccgtcagtagattccattgaaattgtacgcattaccccgtcgcctaattctagagcaacctctaaaacgacagtttcatcattacctttatcgactgttaaggcattattgatatctggtaaatccgtatctaaagaaaattcgacatcgacaacgggaccaataacttggacaacttttcccatactcatagttgtttcttcctcccgcatttttattctaatgctgccgcaccaccgacgatttcggtgatttcagttgtaatttgagcttgacgtgcacgattatatttaattgataattctgaaattaaattattcgcgttatcggtcgcactcttcattgctgccattgaagcagcatgttctgctgttttagaatctaacattgcgccataaattaagctttcggcgtattgcggtagaattgcgtctaaggcatcatccacggaaggttccgtaatgtattctagattttgatcagcaacttctgaaacatctaagtcggtaattggtaacattttttcagctctaaagccagatgttaatgagttaacatggtggttgtaacaaacgtacaactcatcgtaaacaccattatcatacatcgcaacggccattttaataatttgtttaacttcttcaaaagaagggacatcactgacaccacgatattcgtaagttaagttcatgccacgtgctttaaagaaatcagcaccagtcccgccgaccgcaagaattgcgtattcgtcaggtgattgatgcgtttctgaaatcatttggaccattgcttttaggattgagctgttatatgcaccaactaagccccgatcacttgtaataactaagtaaccagttttcttaattggtctttccactaacaaattactcaacgttacttcgtgcttgatcgcctttttaatagttgaatcagcaggttctgcttgtaaactactcttttgacgagcaatgtcaattaattgacttgcagctagatgcgtcacgatttctcgaatcttatcagtataaacttggtaagcaactgagttcttttcgatttgagaaagcttagcaccagaaaccatttgcatagcacttgtaatttgcccagtttttttagtagaggcgattcttcgtttgatatccattaaagattcagccaattaattcaccccttacttatctgagtctttgtcatcggcagcttgttctggtacaaaaccttctgtgaaggccttgatagcagcatcaagtttgtctgtgtctggcaatttagttgtttgacggatttcatccatcaagtctttagcgttactttctagataatcatttaaaccactttcataacgcatgatgtcatcaacaggtacatcatcgatgaaaccgtgtgttaaagcatataggattaccgtttgttgttcaaatggtaatggtttatgcaatggttgtttcaatacttcaacagtccgtttaccacgatttagtttggcttgtgttgcggcatctaaatcagaaccgaattgcgtaaaggcttctagttcacggtatgatgaaagatcaagacgcaatgtcccagaaactttcttcatagccttggtttgagctgccccaccaacacgagaaacagatgaaccagcatcgatagctggacgtgttcctgaatagaataaatcactttccaagaagatttgaccatctgtgatcgagataacgttagttgggatataagctgaaatgtcaccagcttgtgtttcgatgataggtaaagcagtcattgaaccgccacctaattcatcacttaacttagcagcacgttctagtaaacgtgaatgtaagtagaagatatcaccagggtaagcttcacggcctggaggtcttcttaaaagtaatgagatttcacgataagcagcagcttgtttacttaaatcatcatagacgattaaaacgtgcttgccgttatacatgaattcttcacccattgctgcaccagcataaggggcaatgtacaagagtggtgcgggttggctagggccagcttcgacaacaattgtataatccattgcaccataacgccgtaaggtttcaacttgtgttctaacagttgattccttttgaccaatggcaacgtagatacagatcatatcttgacctttttggttaataatcgtatcgatcgcaactgatgttttaccagtcttacgatccccgatgattaattcacgttggccacgaccaattggcaccaaggcatcaatcgcttttaaacctgtttgtaaaggttctgaaacagattgacgagccataacgccgggtgctttcttttcgatagggcgtgttttgtctgttttaatttcgccgcgtccatccactggttgacccaaaggattaacaacacgaccgattaaagcatcgccaacaggtacttccatgatccgacctgtccgtttaacttggtccccttcacgaatattttcgtattcgccgaggatgatgataccaacatcatttgtttccaagttttgtgccacaccgtatgaaccgttagagaattctaacaattcacttgagagggcattttctaaaccgtgagcacgtgcaatcccatcaccaacataagtgacagtaccgacttcttcaacggctaattcttcattataatttgctagttgttgtttaattaatgcactgatttcctcagttttaatgctcatcaggttcacctctttatcaacgattgactatttcaataataacgacttaatttggtctaagccgtgtttgacacttccatcgattaccttatggttcgattcaagcacgataccaccaataatatctggatcaacgacactttcgattaacacttcgtttaagccttcgcgtttggcgaaagattgactgatcttagctaattgatcatcgtctaaagcaactgctgaagtcaccttagcatgcgcaatccctttatgttgatcatagagatcttcataagctgcgataatataaggcatttcagccattctttgatagtcaaaaactaagctcaaaaagtgttgcattaaagtactaaaatcactactcaatgattttaataagttacgctgtttcaacccagataaggttgtatctgttaaaactgtgcctaattttggattgtcattgaaaatggtctcgagtgcttgtatctcatcatggatactttcaaattgttgctcttgttctgcaagggaaaataaggcctttgcatagcgttgtccaactgcatacttatctagtttcattttgcttgtccaacccttcaatataggaattgatcaatgacttttgatcagcgactgacaattctttcttaatgagtttagaagcaatttcaatagataattgagcaacatcatctctcgcactgtttaacgcatctaaacgagattgttcgatgtcttttttagcattttgttttaaagtttggacttcttcttgggcgagggtaatcataccttcgcgttgtttttcaccgttttgtttagctgtgttaacaatctcaacggcttctgatttagagctcttcaattctgttgcgcgttgtgcagccaatttggcagcatcttcacgtgattgagcggcgctatctaaatcattggtaattttatttgaacgttcctgcatcatttttgaaacaggtccgaaagcaaatttaccaactaaagcaactaagatgatgaagacaacaagtacaaatagtgaatctccaaggtaagatgcagaagcaccaacgattaaattactaaacatctattgacactccttccttgacttactgtctaatttttaaagtgaaacgttgttcactcggattaactaaataagatcaagaaagaaacgacgattgataaaattggaacagcttcaatcaaaccaacaccgataaacattgttgatcttaattgtgctgacaattctggttggcgtgccatactttcgattgtcttagaaattaccttaccattaccgtatgatgctgcgaatgctgcaagtcctgctgcgatagctgctgctaaaaagttcatatttttttcctcctgattttagtcttccatttcgactttctctgaaatgtagaccattgataatgttacaaatacaaaggcttgaattgatccgataaagacggaaaatccttgccataccatctgaattggtgctgtgacaagcattgtggctgggccatgcgagaaagccatcttaactaaaagattcaataaaacttccccggcaaaaatgttcccatacaaacgcaatgacagcgtcaagaaattggtaaattgttcgatgatattaatcggtaagaaaaatcctactggtttaatataactcttcaaataattaccaaatcctagtcgttcaatactgaaataatgcgaaaggactaatacaatcatcgctaaggacattgtaataatcggatccgcagttggactcttcagccaaaccacttcgtccaccttcatctggaaaatcaaaccgaactgattactaatgaatacgaaaagaaacataacaaaggcaaataggtagaattgcttcccttcttcgcccggcatagcactcttaacgataccattagtaaagtcgatcatccattccaggacgttctgccgcttggttggtttcaacgcaatctttcttgataagaagaagacgagcgcgaaaacaattgctgcacttaataataccgaaaggcagttcgctaaattaaaacgaattcccaaaatgctaataatgggatatttatcacccacaagattccctccttccctaggcttatttactagttcacgcgagttctccgattaacaactacgtacaaccaattaacctaaaaaacagtaacatttatgtaaaaagacgcataaattattaccgcaacacaattaagataataccaccattaatttgaaagtacaaagtaattagcgattaatttgcaattattttttgttgagtcggttaagcgttaaataaagcgctagcatgttcaaaatgtaacgttgggtatcaaaaaagcgtccgccaaatcgccgaacgcctcctattataagtctattaattatttagtcccgaataagcgatcaccggcatcgcccaaaccaggataaatgtagccttcttcattcaatccatcatctaaaccagctgcataaatatcaacatctggatgtgcttcttgcaccgctttaacgccttcaggtgctgctactaaaacaactaaacgcattgatgttgcaccacgttttttaagggcgtcaattgccataattgcagaaccaccagttgccaacataggatcaacgataaataattgacgttggtcaatatctgttggtaatttaacgaaatattcgtgtggttgaagcgtcttttcatcacggtacatcccgatatgaccgactttagcggctggaatcaattccaaaacgccatcgaccatgcctaaaccggcacgtaaaattgggacaactgctaattttttaccgctcagttgcttttcaatagctgggcccattggtgtttcaacttcaacgtcttccattgctagatcgcgcgtaatttcgtaaaccattaattcggcaatttcattcgccacttcacggaacactttagtccccgtattcttgttacgaataattgttaatttgtgttgaattaacggatgatttaaaactgtgaactttgccattaccttttgcccctattctattcaatttgatggaaagaatttcaacaaaaaagagtgactccaaagaaaacatcctctgagccactctcctttccgcttaaaattctgtttactattgtagcgtatatcacagtaaaaaactagcggtattcctaaattaatctaaaaactttgcttgtgtgattgggaattggtcggttaatttcaagaccgcttcactaattgcggtcatcgcttctagttgatcatatttttcgatcacttctagaattaaattggcaatttgttcacaatccgtttctttaaagccacgcgatgtaatggccggtgtgccaattcgaatcccgcttgtcttaaacggacttaatttttcaaacggaattgtatttttattaaccgtaatatgaacgctatccaatagattttgcagttcttttccattgaggccactattggtcaagtccaatagcatcaaatggttgtccgttccccccgaaacgacccggactaaatctgattggtcaaagacagctgccattgcttgcgcatttgcaacaatttgttttgtataagctgtaaattctggttggagcgcttcaccaaatgcaactgctttagcagcaatcacgtgttctagtggtccaccttgaatccctgggaaaatggcagagtcaattgccttagcatattctgttttgcaaagaatcatcccaccacgcgggccccgcaatgtcttatgagtggtcgttgtgacaacatcggcatatggcactggactcggatgaacacccgttgcgactaaaccggcaatatgggccatgtcaatcatcaaataggcaccaacttgatcggcaatttcacgtaaccgcggaaaatcaattgtgcgactataagctgaagcaccagcaacaatcatcttaggatgcacttcttgcgccttagcagctaagctagcataatccaattgttcgttcgtatcagcaacgccatagctataaaagtcatagagttggccactaaagttgaacggtgacccatgcgttaaatggccgccatcagttagattcatccctaaaatcttatcgccaggttccaatagtgcttgataaaccgccatgttagcttgcgaaccagaatggggttggacgttgacgtgatcggcaccaaataattctttagcccgttcaattgcaagtgtttcgatttcatcgatatactcgcaaccaccgtaaaatcgcttgttgggataaccttccgcatatttattcgttagcacactgccctgtgcctcttgaacagcacccgaaacaatattttcagacgcaattaattcgatattatgacgttgccgattttcttcttgcttaattaaatcattaattactggatctgtcttagctaacatgcacaacactccttagggggattattgggtcaaaagtgctcacttgcaattcacgatcactggtcattaggcaattacttaaccattaatcggcttgttgcttgctaaaatacttttgccctgctgatttttcgagacggttcatatacgctaaaccaacaccctccttggcaaagccttggacaaggattagtttaacttccggattcaaatcaaaataccgtagtccttcaaataaatgctggctcgctgtgacaaccgattcacctaatgagaattggtccttgaagcggacttttgcttgcttttccaaaatcgtatcgacggccatcacaccaaatgggacagcttgttggctagcccagtcaatcgcagcatcaaagtcatccggattagcgacaatatgaacctgtgcgttaggcgcataatgcttatacttcatcccgggtgctttcggtgtttctgctgctccgactttgtgcttattggtcataattggaccaatgacgcgttcgatagcttcttgtgttaccacgcctggtcgtaaaataactggggttgcgacacttaagtcaataaccgttgattccaagccaacaccggtaggcccgtcatcaatgacgccggcaatcttccctgtcaaatcatgtaatacatgatcagcaagcgttggacttggtttcccagaagtattagctgatgggccaacgattggtaccccagcggctttaatcaatgacaatgtcacttgattgtctggcattctaaaagcggcggttttcaaaccacccgtcacaacggcatcaaatgccccatgttttaagggcaagataatcgttaatgaaccaggccaaaaagctttgactaattgcccaaaagccgggtttgacgtcactgcgtaatgttcaaccgtttcaaccgaagcaacatggacaatcaatggattatcgctaggacgtcctttggcagcgtagaccttcttaacggctgctggattagtcgcatctgctcctaagccataaaccgtttcagttggaaaagaaactaattcgcccgcatttaaagcagcggctgcttgttcaatttggttgactgtgtatcgttttgtttccattatatgccttccttaatcaacatcttattctataataacaaattccgattaaaatcgtaactcacacgcatcattctagaccaatttgccatatctttttgtacttccaagctaaacagagggtctctttgttcaaaaatccgaacaatcgcttctttttgttgataaccaaactctaaaaagagtgcgccttctggttctaaaaatgcggggacttcctgtgcgaagcgttcataaaaggctaacccattattaggcgcaaataacgctaagtctggttcgtgtttaagtaccgaagcatccatgacagagcgttcgtcttctgcaatatatggcgggttcgaaacaatcacgtcaaattgttgccccataataggcgtcaagaaatcaccttcgatgaagtcaacctttgcacctaatgtttgggcattttgttgagccacggcaattgctgccggtgaaatatcaaccgcagccacttgccaatcagggcgttcacaggccaaggtaatcgcaatggcaccagaaccggtcccgacatctagcacttttagtggtctatccttaacaggggctactgacaatacccattctaccaattcctcggtctcaagtcgcggaataagcgttgcgggcgtcaccttaaaatcacgtccgtaaaaattggcataacctaaaatatattgtgccggttgatcctccgcaaatgccgccaaatcggcttgatattgttcatactcgtttgcgggcatttcatctctgtaatgcaatactaattgagtggtcgtccaatgatgacgtcctaataataggaaacgcgctgcttcatgttccttattgcgttcttctaaaaataaaaaagcccaattcagggctttaagataagtgagctgtgccatcttgtaattgctccaatttctctgtttgatcgaagaggattaaggcatcgattacgtcgcctaattcaccattcataatgcgatctaacttattgagcgtcaaaccaattcgatgatcggtcacacggttttgtggataattatacgttctgattcgttctgaacggtccccagaaccaacggctgatttacgacttgagtcatattcactctggttttgtgattcataataatcataaacacgtgcttgtaaaatcttcattgctttaacacggttttgttgttgtgaacgttgatcttgcattgccacaacaatcccagttggaatatgggtcatccgaacagctgaagaggtcttattaatatgttgaccaccggcaccagaagcacggtaaacatcaacccgaatatcttttgcttctaattcgacatcgacaccatcgtattcaggcataacagcaacggttgctgttgacgtatgaacacggccttgtgattccgtctttgggatccgttggacacggtgtgcaccattttcatattttagtttagaataaacattcttaccggtaatcatcatcgcaacttctttgaagccgccgacttcagtagccgtttcatcgatgatttctgtttgccagttttgtgattcagcgtaacgttggtacatgttgaggaggtcaccagcaaatagacttgcttcgtccccaccagcagcgccccgaatttccatgatgatattcttttcatcgttagggtcagttggtaacattaaaatcttaatttcttgttctaattgggctttttcagtttggagttcttctaaatcagccttaactaattctgtcatttcagaatcggttgtttctcgcaaaagttcttcattttcagtcacttcgcttaaaacttccttcaaacgcgtatacttgcccacaatttcgcgcaagcccgcttcttccttagaaagttccatgtagcgactggtttcattaatcacttctggatcagacattaattcctgtaattctgcatagcggtctaataaaccatcgagttgttcaaacattttatccatgaatgattagccttccttttcaatctcttcttgtattggtgggttaaaatagtgcttccggcatactggatagtaagcttcattgccaccgatttgaatctgttcacctgtataaacaggcaagccgttattcattcgcaagttcataatcgcctttttacggcagaaccaacaaatggtcttcatttcttctatcttattggcaaacaataagaggtatttcgagccttcaaataattcattcttaaaatcatttttaagaccaaacgccatcaccgggatattcaaatcatcaacgactttggcagcttcgataacatggtgccgttctaaaaattgtgattcatcaattaaaacacaagcggcatctggattagttgcttcaaccaattcgtaaatattcgtgtccgaaaagattggtgttgcttcgcgtttcaaaccaattcgacttgaaacgattcccacgccgtcacgattatcaatcccactggttaagataatcactgatttattctgttcttcataattatgagcaacttttagaatttcaattgatttaccactgttcattgcaccatatcgaaaaaataattgcgtcatttccaaacacccctatatcaaagcacattttagtctagtatacctgaaaataggaatcgcaacaatatcggccccgataaaaactaaagtttccataaattttgccccttcatgacttccctatcgtcgttttccagaaaatatgctattattatgaacattgaaagggtggcttgcatgacaattaaaagttcatttgcaacaacaacgggacgtttttcatactggttcttacatacctttatgaaaggcggcagctctttacctggtcagattgcaacaaatctagaccccgctgttttgaaaaacttaactaaaaactacgacgtgattatcatcactggaactaatggtaaaacattgacgacagctttgacggttcaaacgctcaagcaaaaatacgacaacatcatgaccaattcaacaggatcaaacatgatgcaagggattacgacagcctttttggcccatcatcctaaaaaaggtcaaaaacaacttgcaattcttgaagttgacgaagccaacgtcgaaccactttgccgctacgttgaacctaaggcaattgtgatgactaacatctttagagatcaaatggatcgttttggtgaaatttataccacttataataagattttggctggcgttaagctcgtgcctaatacaaccttaattatgaatggtgatgtgccacttttctcatcggttgaattacctaatcctaaaatttactacggttttaatcatcaaccagatggcgaaatgctcgcaccaagcaatacagatggtgttttgtgccctgtttgccaacatatcattcactacaagttcatcagttatagtagccaaggcaaattctactgcccaaattgcggcttcaaacgccctgaactaacggatcaagtgacggccatcaacgaaatgcgcccaacaagttctcaatttgaaattaaccaagccccttttgaaatctcaatcggtggtatgtacaacatctataatgctctcgcagcttacagcgttggccgcttcttggatgtccctgtttcggatattcaaaaagccttcacgcaaaataaaaaagttttcggtcgccaagaagtgattcaattgaaggacaaggcggtcacattggtgcttgttaaaaacccagttggcttaaaccaagtcctccaaatgattagctctgatccagaagatttctcattggcaatgttactgaacgctaactacgctgatggtattgatacaagttggatttgggacggtgaattcgaagacctcttgaaacaccacattccaacggttatcaccggtggcgaacggcgtgatgatatcactttccgcttgaaagtggctggcgttactgacgaacaactacacgaaacagccgacttagatgcgacactagcagcgattgaagcagcccctacgaaacatgtttacgtacttgctacctacacggcagtcttgcaattacgtaaaaaaatggcagaggccaactacattaagaaaggactgtcagtatgacccaaactttaaaaatttgtcatctttatggcaacttaatgaatacttatggggatctcggcaatattttagtcctcgattattatgctaaaaagattggtttaaaaacagaaaccgacgtcatcagcattggccaagatttcgatgccagccgctacgacatcgtcctcttcggtggtggccaagattttgaacaaaaaatcatttcagaagatcttaccagtaaaaaagctgcactcacagcatacatcgaaaatggcggcgtaatgcttgccatttgtggtggttaccaattattgggccactactacatcggtgcgaacggtgataaaattcctgggattggtgcccttgatcactatacactcagccaagataacagccgttttattggcgatatcgtgattgaaaaccgtgaatttaacgaaacttacctcggctttgaaaatcataacggtcggactttcttaggaaaagatgaaaagccactcggttacgttaaacgtggtcatggtaacaacggcgaagacggcactgaaggttgtgtttataaaaacacctttggttcttacttccacggcccaattttaacccataacggtgtcttagctaaacgcctcttaacaacagcgattagccgccgtttcccagagtttgatcttcaaccactagcggaccttccaatcgaagaatcccgttaccaagtcgacgcagctggtgtcaaaaaggtgcaaaattaagtactcccaaaagaaccccgacaatatctttttcgatattgcaggggttcttttttacattttaatctgccaattttaatctgccaattttaatctgccaattttaatctgccaattttaatctgccaatgttaattgactttgagccgctgccaaacgcgcacttggcacacggtatggtgaacacgagacataatcaatgcccaaatcacgataaaacggcatcgctgttggatcaccaccgacctcgccgcaaaccccaatcgataaatcaggtttggtttgacggcctttttgaaccgccaattgcatcaaagcaccgacaccatcttggtcaagcgtttgaaagggttcagccggcatcaagccttgttgctgataatccggcataaaatggccaatatcatcgcgggaaaaaccatacgtcatttgcgttaaatcattggtgccaaaactgaagaaatctgcggtcgctgcgatttgatccgcaactaaacacgcccgcggaatctcaatcattgtgccaatttgataagttagttgttgctgattttctaccaaatagtcgttgatggtttgttgtaatagttgttttagatatgccatttcagtcgctgtgccaattagcggcaacattattttaggcgtcacggcatggtggtacgttgtttgaaccgccaaggcactctcaacaatcgctaagacctgcatttggtaaatttcaggataggtcaccgccaaacgactgccacgatggcctaacatgggattaacctccgctttatcagcaatccggcgcttaatttcggccaaactaatgcctagcgcggttgctaattcagcctgttccacttcattttgcggtaagaattcatgcaatggtgggtctaacaagcgaattgtacatggtcgctcttcagctaatgaaaagatttgcttaaagtcagttatttggagggcttttagtgccgccaatgccacttggcgatccgctagttcagttgctaaaatcatttggcgcattttaaaaattcgttctgggccaaagaacatgtgctccgtccgcacgagtcctaacccctgtgcaccaaattcaaaagcagtcgccacttcttgcggtgtctcagcgttagcccaaaccgcaaatggtgcaatctcatcacaccaactgagcaccgttccaagcgttgtttcatgaacgcctgtttgttgtggcaacgcccctaaataaaggcgaccggtatgaccatccaccgaaataatcgccccttcttttaaaactcggccggcaaaatgtgcctcacgttgttcataatcgacttgaagttgctgacaaccaacgacacagcaacagcccattccccgtgcaacaaccgccgcatgcgatgtcatcccaccacgactagtaacaattgcttcactaattaccatcccatcgatatcttctggtgatgtttcttggcgaactaaaacgactttttcaccagcttcgtgtgcctgttgtgctttttgggcgtcgaaatagatcgcaccagtagcagcccctggactcgctggtaacccagtcaataactgtgttgcctgttgcaccgcactagtttcaaaaagtgggtgtaacaacccatcaatcatcgtcggcttcaagcgactaatcgcggttggccgatcaatcaccccttcatcaactaaatccacagcaattctaaaagcagccggtgcggtgcgtttgccaacccgtgtttgtaagacatataactgcccagcttcaatcgtaaattccatatcttgcatatcccgatagtgggcttctaattgattggcaatcgttttgaattgttcataaattactggcaattgcgcctttaacgtcgcaattggttcgggggttcgaatccccgccaccacatcttcaccttgtgcattcaataaatattcgccaaacaaaccaggttcaccagttgctgggttccgagtgaacgcaacgccggttccactttgcccctgataattaccaaagaccatttgttgcacgttgactgcggttcccatggcaccgtcgatttgatttaaacgtcgataagtctgcgcacgtggattctgccatgatttaaagacagcttcaatggccagtcgcagttgttgatcaaccgactgtggaaattgatattgtccggccgctacgtacaagcctttataggtttcaatcaattgttttaaatcaactaacgttaagtccgtatccttttgaacttgccgtttatttttaagtgccgttaatgccgcttcaaaaattggcttatcaataccgtaaaccacatccccaaacatttgaatcaaccgacgataacaatcgtaagcaaaccatggatcattggtcatttcagctaagccgattaccgtttgatcgtttaaccctaaattcaagatagtatccatcatccccggcattgagattggtgcaccactgcggacggacaccaataacggctgctcagcattccctaattgccgctgcgtcttttcttcaagaatatgaaccgctttcattaattcgtcttctaaaaaacccgtctcttgtttagcacttgttaagtattgtcgacaagcagccgttgtaattgtaaaaccggctggcacgggtaatcctaagcgcgtcatttccgctaagttggctcccttaccacctaattcttgattggttaacgtttgatcttcagcaaaagcataaatatagttcatgatagcgcctccaaattttatcgataaccgcattatatagtgtgtcacattgcaagtcaatagtgtagtttataaattttaataggccacgctattgtgtgaatatattgcaattagcgtaacgctatcctataatgagtttattgaaaccgatttattcaaaggagcgcttatggaattatctaaccgccaacaggcaattatcaaaatcgtcaaaggaaatcaacccattagcggcactaaaatcgctgaacaattgcatctttctcgggcaacactgcgcaatgatttcgcaatcttaaccatgaccggtattttggacgcccgccctaaagttggctacttttacgtcggccaagaagtgatgccgctcttaaccgatgaactctaccaagaaacagtcggtcaactgatggtcccacctcttttaatccctcaaacgacaacgatcgatgaagcagtcacgcaactattcatgcacgatgttgggtcgctttatgtgacggatgaacagtcaggtttactgggcgttttgtcgcggaaggacctactacgggcaaccattaatacaactaatacgcaagctaccccagtcgctatgattatgacgcgaatgccaaacattacaacgaccaccgaggacacacctgtcttacacgccggtcaacggttaattgcccatcaggttgattcactaccagtggttgccattgatggcatcacggtcattggcaaaatcaccaaatcgattatcatgcgctatttcatcgaagccggactacacaatcaatcataattttttggaggattacaaaatgacagcgattccaatttttattatttcagattcaattggcgaaacagcccgaacagttatcgcagcggttaacgcccaattccccgcgtcagtcacccttaaaattcaacgctttccgtttattaccgatcaaaaaacattaacccccattttacaagatgcccatcaagaacaggcaattattgtcacaacacttgttaaccacatacttcaagaaacggtgacgcaattttgccaagtcaagcatttgaccttaatcgatcttctgtctccgctgaccaccgccattagcgaacgcagtcaaaccgcatcactggaaaccccaggctcattacggaaacttgatgaacactattttcatcgcattagcgccatggaatttgccgttcgttacgatgacggtcaagatccacgtggtttattagaagccgacatcgttttattaggcgtttcacggacctcaaaaacgccactcagtatgtatttggccaaccaaaactatcgcgtggccaacttaccactcattcccaacgtaccgttaccaaaagaattattcaaagtgcccgcccataagattatcggtctaaccatgccactttcaacactgctaaaaatccgccaagaacgtttggccaccttgggattaccgcaaacaacgaactattccaatatgacaaccgtcggtgacgagcttgcctatgccaaccagatttttgaacaattaaacgccacgacgattaatgttgccgatcgttcgattgaggaaacggctagtttaatccaaaccttaatctaaagattaaggaaacgacttaaccttttttaaagaaaaaagccgatttttattcataaaatatcaattgtttgataacattccccggctatactgttgttatagattaaaaggagcgatcgatatgctaataaaaaaccaaaacattgaatccgttaaaattaaaagtattgatagtcaagataaggtcctcgcgacaaccgagtccggcgaaattatcgaactacatatcaccgatcaacaaaagaaggatcggcttttctgggaatcattggtgaacgttttacgcgctgaactctggctccccctcaaaaagaaaacccatgaactcttacaaaacgactggttagcagaaccagaattaaattaactaaaaagaacgttgaccagaagtaattctagccaacgttctttttttagttatttttcaccttgccattccgcaatgtactcggccacaaaatcttgcatgacttgtgttctagcggttgcgatttctcgcgccacttgcgtattcatcgtcgccgcgagtttgaagagcttttcataaaaatgattaaccaccgttgaaggttcccgataattagccttggttaactcggcccgtggttgaatttcaggatcataagccaccccatcgtgagcgccgccatacataaaggtccggccaataccaatcgcgccaatcgcatctaaccgatccgcatcttgaacgatttgcccttctaaacttaatgcttggtgctgattaatatttttagaaaatgacatatgatcgatgatgtcaaaaataacggttgattgcatcttatcaatgccattttgggttaaaacagccgctacgctttggcgggcttgtgccacatcgctaacaattttttcatcaattacatcgtgcaatagtgcggctaatgtaatcgttgttaagtcgccatcaccaacttggcgttgaattaagcgggcattatttacaacccgttgaatgtgatcaaaaccatggccactatgctcctgagctaacgctgttcgtacgaattgttcaattgcttcaatttgtttttgcataactgccaccctactcttttaatcattaaaaaaattgcaaccacggctgcggttgcaattcgttatgtttattttacttgttacccggttctgaagcaataatttgcatgttaccttttaagtcccatgacttaatgccaaatggtaagacaaagtgcatgttcttatgaattaggtaggtttgaccatccgcaaccaattcaccttcaccgtcaaccactgatactaaagtataaggggctgttgtccggtcaaagtgtaaatcacccttgaccaaccattggtaaacactgaaaaatggtgacattgggggttgcacataagttgtgatggttgaatccccaacgtgttctgtttgaatattcaaaacaggatcttgatggggcacaatcgtggtatcaattgattgttttagatgcaattcacgtttttcacccgtcttcgcatctactcgatcataatcgtataaccgataagtcgtatcactactttgttgcgtttcaagggccataatccccttattcaaggcgtgaattgtgccacttgggacgtagaaaaagtcgcctgttttaacaggtactttgcgcaataagtcatcccacttacccgcttcaatcatttccgttagttctgctttgtttttagcatgatgaccatagattaagtaagcacctggttcggcatctaaaatataccaacattcagtcttacctaattctgtaggaccttcgtgagcagctgcataagcatcatctggatggacttgaactgataagcttgcttcagcatccaaaatcttcgttaataatgggaaaacttctcccttggcatcaccaaaataatcgcggtgttgggcccaagcttgatctaatgtaaggccttttaagggaccgttttcgattgtgctgggaccatgtggatgtgctgaaatcgcccagcattcaccaatgtcgccatctggtaaatcatagtcgaaggcttctgctaatttgcggccaccccaaattttttcttggaaaactggttttagaaataatggttctgtcaattcaatcactcctaatgcactttatttatcaatgtttctattctaccataaatgaaagcggataagacatggtagtaactgtttttaaagcgatttcgtgattaaaccttatcttcagccaagaattgatccacaatcattgtccgacgatcaagaaaagcttgattatctgctgtcgggtgaatccgattgctcaacacaaccaagcctgtctggcgttttcgatcgagtaacataaaagtccccgtaaaaccggtatgataaatcaatggggtctgatccgccgtaaaacgtaaatcccaacccaatgaccggcctagatgagctggtgtccagtcgcggtataagcccttaacacttgcttggctaacgggggcctcagcaacctttaattgccccagttggaactgcgcaaaccgtacaacatcgtctaggggtgcaaataatcctgctgcaccactatgattttgcaaaacataactcttcggatcatgcacaacaccttgaataaggcctctagccgttgttagttcagttggtaccgctcggcttgcttctggggcaaacgtactctcagtcatccctaggggggttaaaaccagactttgaattaagtcttgaattggtttaccataaatcacttctagcatccagcccaaatacaacatgccgatatctgtgtagacaacctttttcccaaaattaggtccaaccgtcaattgcgtcaacagcgcttcttttaatgctggcgcagctaactgattacgattaggaatatagccctctaagcccgatgtgtgggtcaagaggtgcaaaaccgtcacccgtcgatctttaaacgctggtaaaatgctgtgaaccttggtcgtaagtgacaggcgtccccgctctaacaaacggagaatcaacgtcgtcgtcccaatcaccttcgtcaaagacgctaaatcgtataattgtcctggttctaacgggattagtttaggcgtcagttctgaataacccaggaccttagtcgtcacttgctggccttcaatcacagcatatgaaacacctggtacaacctcatcagccactaacgcctcaatttggtgaatcgtttgttcaaatcgcatctcaaaacctcctatttgaatcaatactattagtatacgccatctaaaaaaagacaccaccagtttaacctgatgatgtcctttatttaaaaccaatttaaatctcgacgttccctgagaattggctgttatatagatcagcgtaaaagccgtcttgaaccatcaattcatcatgtgtgccggtttccataattgaaccgtgattcatcacaatgatattatccgcatcccgaatcgttgataaacgatgggcaacaacgaaactcgttcgattttgtaatagccgttccattgcgtgttggatatgaatttcagtccgcgtatcaaccgaactagttgcttcatccaagattaagatatctggatcggccacaaaggcccgggcaatcgtcaataattgccgttgaccttgtgaaatgttggaagcttcttcattcaagactgtgttataaccttccggtaattgacgaacaaagccgtcaacatgggccgctttagcagctgccaaaattgcttcgtcagaagctgattcattaccatatttcaagttatcccaaatcgtcccggtgaatagccaagtatcttgcagaaccatcgcaaaatgacgccgtaattcttcacgactcatgtcacgggtatcaacaccttttaatttaatcgaaccgccactaacatcgtagaagcgttcaagtaaattaataatagttgtcttaccagccccggtaggaccaacaatcgcgatcatttggcccggtttaacttgtaaattatagtccgtcaataaaagatccttgccttggtaaccaaattcaacatgttccatttctaattggttggcatcatcttgcaccactgggacagttgaaggttcttcagacatatcttcttcatctaaaacagcaaaaacccgttcagctgaagcaatcgttgattgaattgtgtttgccaagttagccaattgtgagattggttgtgagaattgttgtgtatattgcatgaaagcttgcatgtcccctaatgtgacttgaccgtgtgagacgcgaatcccaccgataatcgccacgaagacgtaccctaagttattgacgaaagtcatcaatggcatgatcacaccagagataaattgggctttccaagcagctttatacaacttttcattttgttcttcaaatgtatcaatcgtcacttgttcccggttaaaggtcttcaagaccacttgacccgaaaagttttcttcgatttgattatttaataagcctaaactcttttgttgtgcagcaaagaatttttgcgacttaggtgcgacaatcccaatgacaattaaactcaacggaattgtgaccaaagcgatcagcgttaattgccaactgatcgtcagcatcatccataaaacaccgataaacgttaccgtgctggtcaccatttgcgttaaactttgttgtagcgtgctggcaatattatccatatcattaatcgcacgactcatgatatccccgtttgaatgggtatcgtaataattgattggcacccgttgcatcttatctttcaattccttacgcaattcatagacggtttgttgtgaaatccgcgtcataataaattgttgtaagaaactgaagacggctgaagcaagatacatcaagatcaccgtcatgataatgtgttgaatcttatcgaaatcaattggtaagcgatccattgcaatcccagctttttgcatggcattgcctttcatcacccctttaaagatttcagttgttgcttcccctaaaactttgggcgttctaatttggaaaataacggagacaatcgccaaaacaatgacaaatactaaggcaattaaacggctcgacatgtatttcaataaacgattagttgtgccccagaaattcttaggcttttcaacgacgccacccatgccgcgacctggaccgtgaccaccttgtggccggtttgttgctgctttttctgccattaggcttcatccccctctctgatttgtgaattgataatttcttggtaagttgcatttgttgcctttaattgggcatgcgtgcctttaccaaccatttggccttcatctaagaccaagattgtatcggcatcagccaccgttgagacccgttgtccaacaatgacgacgacactcttttgaatttcagtatcttccttcaaggctttgcgtaaaagggcatccgtcttgaaatctaaagctgaaaatgaatcatcaaagacataaaccgatgcgcgtttaactaatgctcgggcaatcgctaatcgttgacgttgaccacctgagaagttaccgccaccttgttcaacgtgactgtctaagccaccatcaagttcgctaacgaaatccttcgattgggcaatttcaagtgcatgccaaatctgatcatcagttgcatccggattcccatattgcatattttcgcgaatcgtccctgtaaaaagattggctttttgcggtacaaatgcgacttgttcatgaatatcatgcaatgtcacatctttgacatttaacccatcaacttggacttggccggcttcaacgtcgtaaaaacgcggaatcaagttaaccaaggttgatttacctgaaccagtccccccgataatcgcaacggtttgaccagcagatgcttggaaatcaatcttctctaaggctaatttttctgcattttggtagcggaagttaacattatcgaaggccaagctgacagtttgatctgtaaaactcttgggattttctggattttcaattggtgtttgtaaatccaagacttcattaatccgaacggctgatgcttgtgcccgtggaatgaagacgaaaaccattgaaagcatcatgaaactcattaagatttgcatcgcataagtcatgaaggctaataagttccccacttgcatggcttgatcagcaattaagtgaccacccatccaagtgattgcaatgtttgtcccactcataatcaatgtcatcacaggtaacatgacagacatgatactgtagacctttttagcattttgtgtgtaatctaagttcgcatcgtcaaaacgttcctgttcgaacttatcgcgacggaatgcacggattacccgcacccctgttaagccttcacggaaaactaagttaatccggtcagtcttcttttgcatcgctttgaaaagcggtacggcaaagtacatcacgacaccgataaagattgccatcaatggtaagacaacaacgaagattgacgttaattgcgcgttcttttggtaagccaagaagctggcaccaatcaacatgataggggccatgatcatcattcgtaagaacatcattgccacattttgaatttgaacaacatcattggttgtccgtgtaatcagtgacgaggtccccacttggtccatttcatcgtgtgagaaattgatgacctttcgataaatatctgatcgtaatttctgacccagaccttgtgatgtcttagcggctaaataaacgttacagattgcggctaggatactgatcaatgaaaagccgagcattttgaagccggcttgccagatataatcaatatcacctttggcaatcccgttattgacaatatcagacgtcaaattagggagatacaagttactgacaacttgaatcaccatgaataagacagcaccgaaaacggctaagcccgacattctcttttttgcaagtttaatcatgcgttttgttccttctttctattctacttatcttgaacgctcgcgccggtttctaaccaaccagtgactaattcgaagtgttcgtagatttgttctattgttaaggcttgctcagtatcacgatttaaataataggaagcaatgctttgaaaaacgttattcattaattgatggaggagcaatctaacagcattcggctgcgttttatcaattttcaacaaactaaaatcaacgtgatccattaaaaactgaaagccctccgtttgatgcgcatgcatcaattcgggcgacatcttgcgccgatttttgaaatccatgtgtaaaaataagtgccgatagaactgtgcattctcaccattaatggcttcattcgccattgccttgaagaaaatgcgaatcgtcttgaaaagatcacccttggtatctaataagagctgttccaaatcctgtttagaactatcacgcagcaaactgaggtcgtaaaagaaaatatcagccttatcttcaaagtactgatagaaactaccccgtggaatttcagcagctttaataatgttgctaactgatgcttcattaaaaggaacccgtgaaaattcggcatgggcggcctttaataaccgttgctgtttttctgccggcaaccggaaaaaagtttttttaggcatgcattaagactccttccaactaaaaatgacataccgtcgtaaaatatgacgttctgtcattttagcactgattttaattggatgcaatactaagttatcgtcataattgatgcaatatcactcgctagccgttattgtctaacgtcacaattaatcctataatagaaatactattgttaaaaactaattttgtggggcatatatatgaagttactcaaacgtttttacaccattaccatcgccgtactcgccatcatctcaattatcttcgtcctattagactacagcagtctcatcgatctaacgactgcaccctacctaaccatcgataacacgattttaattatttttacggtcgattatttcgtgcgtctttggtttgctactgataaacgccgcttttttaagacaaatatctttgatctgcttgcaatcatcccactaagcactcttttttcatttttccgactcgggcgcctatttcgcattgctgggttaatgaaagttttccgttttacgcgcttggtgggcttaacggggaaattacaacgccattccaagaaatttcttaagcaaaatggtctgctctatctgacttatgtcagtgccgccgtattaatcatcgcttccgttttatacgcactcgccgaaaaggcaacccttgccgattcattctggtgggcgattgcgaccgccacaacggttggctacggtgatatctcaccgcacacgctaatcggtcgtatcgcagcaattatgctgatgtcagttggcattggctttatcggtacactcaccagttcaattaccagttacttcactcaagataccgacgacaaactagacgaaatccttaagaagctcgatcatctcgaacaagaaaacaaaacgctcaaggcactttatcacgacaaggaatctgaatcaaaataattaatataaattaaaaaaatacgataataatcaccagatagcggctttaagccttttaattagttatttatagcactggtaattacaataaattgtaaacaactaaaaaaggttggctaaacaagaaataattgtttaaccaacctttttaattttgagcataaaaaaacctcgcataagcgaggtttaaaacattattaaagtttaacgatgtttgttgcttgaggaccgcggtcgctgtcttcaacatcaaatgatactgcttggccttcgtctaatgacttgtaaccgtcaccttggatagctgagaaatgagcaaatacgtctttgccatcttcaccagtaataaaaccaaaacccttgtctgcgttaaaccattttactgtaccgttgttcataataatttcctcctaatacatatacatgtacgttttgttgcaataaataatgataaataaacgctgattagagttatgaaattcaaaacttaaattacgcttcaatattgattacttgtttataataccatataaattattaaatagcaaaaaaagaatttttttttattgataatctcactaatatgctatgatagccacatggaggtggcgcgtattaaacatttcaaacacattatctgttttatcttgcttttaatcatgcaacaaatcccccttttattagtaggtagcttagctgccctaccaaaggcacagcgaacgacgcatttaattttaattgtcgggtggctctttttaattctaaccattgggatcaccattttaatgtggtatctttaccaaaaagtaaaagggccgcaatatcataatcatttttcaaaagcccactggcgtgcaattctaattggatttgtcgccatgctagtgattaataatttgacggtgccctttatgcagaaaacaggaaacgccaatgtcgatggcctcgttcaaatttttgccgtcctcggtattttcatgttgccctataccttaatcttagggccaatgatggaagaattacttttccgtggtttcttaatgaattggttcttcgttaaatcacctattctaaacattatgacgagcgctctattattcggtctcgtacacgtttcaactgatccgatctatttcatttccaaagcactactcggattagtcttagcaatcgtttattatcgcacaaaaaccattaagagtagtatcatattacatgtcttaaacaatctctcagcaggactaactattttttaatcattgaaaggaattcgcctatgtctactttaacaactattttaacctatatccaagaaaatcctgaaacagtgacgttagaaccgttccaatatgctaacgttatccgctttggcatcgatgatcaggtccaactaccagatgttgaaaaactattcccagacatgcggctccacgttaaccgtatcgattcagactatgttaatgcccaccgtgacttattagaagctttttaccaacaaacaatagagaaacaaaaagacggctttcaagatgtctggatcacaaccacccatctttccgaccgtcatattttcctagtggatctttcttttgaataacccacaatttcaagcattaaaggttgaattcgttaaatacgcaattttaaccctcttcttattcgttatgcgggcctttattgcgcacccgattatcattattgccagttggctcagcaccctcgtttgcgtaggctattttgtcgcactggtgatgacttatcactaccgttaacggctcatttttttcgtttcagcgattacttcttcagtgaagtataactgtaatgcaaagaaaattgccagcaatgctgcggctaaccaggctgcacggacattaatgactttgactaagaaaccagaaccaatcgttccgataaagaagctaccaacaattagcccaaaatacttggctttttgttggtattttttttccttcgtggcaataaataaataacaattttcaactaacttccggtaattaccggtcgtaaaggtattggcatatggataaccattaaccgttgaataactggctagttgggttgccatcgacatcgataacatcgtcgtaacaatcatattagggacagcagtacttaaaaacccaacaataattaaaacaatgatttgcaatgcgagtaaccataaacgccaaatattcaagcgtgccgtgttaaagtggcgccgagccaattgcacaataatgaccccaattccaaaagcgatgattggcataatcttttcaggtaattgtgaccattgattagtagcgatatcaacaccgataaacacaatattacccgtttgcgcactagcaaacacgccacctcgtagaatcacacaataagcatctaaaaaaccaccgataaaggttaaaaacatggctgttcctaaccggtcgtgaaaattaattttcttttgcaagacaaaccctccaactcaatacttctattatacgcaaaaaaagaaccgtgacaaaataaatttagtcccggttcttttctagtttatagattgattagattagaatcttgatcatgaacgacttctcggaaagccatcaaaccttgatcaaggccccgcaataacacctccgcagtgccaatattagtggcaagtggcacttcgtaaacgtcagacaaccgaatgagcgcattaacatccggttcgtgtggttgggccgtcaatggatctcgtaagaaaataacaaggtccattttattttcagaaattaaagcgccaatttgttgatcgccacccaacggaccagacttaaagcgtttaacggataaacccgttgcatcaataattttctgaccagttgtccccgtcgcaaaaagttcatgttgggccaaaataggctggtaagctgttgctaatttaacgattaacggtttttgacgatcgtgtgcaattaatgcaattttcataagaaagcctcctaatgtcttctatgtttaaccactgtgaaaaagcggagtacgctcgcaagtaagataaaaaaaatcaatacaaacgaaacgtaattcgcccaaaactgggttactggtaacacaatattaacgagccgttgcaataacatggtaatcaatgtggcacaagcaaccatgccaaataactgtccataacgtttcacggtatcatccgtcctttttgctttatgctgaaggctagcaccaatttactgacactcagtgcgtttcttcataggtagtgtctttagcccaaacgagttagtttgaacaacttctcgaatcttcagcagtccggctgcactaagcaccttatcaaaagttctgaaggtcccatcagtcataccggtcacaaactcttccaaaccactcgcatagcaactactaatagtcacgtaactttttcctttaaaacgatctggcaaagcgtctcctacgtgattaaagcgtactaggcggcctcgcatacaatctaagaagtttttcatgacaccagacatcgcgccccaataagtaggcgcaactaatacccacacatcagctgctaacaattgttgttcaagttgatctaacaccggatttggttgccccgtgtccggtaaaatttggaaatcgtttagaaaaatagttgagacatcatcttcgggacccacacctgctaaaacggcttgtaatagctgaccattaacgccatcgcgttggtgactacctaatattcctaatactttcatgcccaaaactccaaacttttaaattaattctagtgtacactttttaagcaggggttgccaacataaataaagcgctttattaatagtgtaaaaaaaagtaacggcgtcagccactgctttttagtttaaactattttatcttaataccaaccgtttgctaaccagaagctctttgcgccttcccatgaaccataacggcttgttacatattgatctgcaacgcgttcttggttacttgctgagtagtcaccatttaagtatgagcttgataattggtaacgaccaacgaattgaccgttacttgctgagtatgaaccacctgattctttgttggcaatccattctttagctgagttagttgttgatgttgttgtgtttgtagttgtcgtagtagtcgttgtttgttgttgtttaacaactggcgttgttgttgcttgttgttgaacgggttgtgtttgtgttgctgctttttgaacaggttgttgtgtagcaacaggtgttgttgtcgcttgtgttgtttgttgtgttgccactggtgttgttgtagctgcttgtgttgtagcaggtgctaccgtaacagtttgtgtttcttcgtcgattgttaatgtttcgccaacatagattaagttcttgttagcaattttattagcgttagcgattttttcgatcaagctgccgttaccagcaaatttttgtgagattgatgataatgtatcaccgctgacaaccgtgtagttcgtagctgcatcggcatggccgttacttgcgaataaaagacctgcagttgcggcagttgataatgtagcgctgaataaaagtgttttaagtgatttcatattgtgtatttatctccttgttgtttcaaaagtttatttaatgtcgtattaataacgtgacattaatataccatctaaaaatcatttgtaagtatcaaacaagtaacaattgatgacaatcctgtaacaaaacaaccgattaacgacctaatctgtaatattgtcccttgcgatgactggtaatataggatttacaatccattgaaaatgacgcaaaaaaaaggctgttttatctataaattaccgaaaatatctttatttttcattttaaatccaaaaaaattgtcaatctgacatcatttactgatacttttaaatattatttaccgatattaaacactaaattaaccaatcacattgattaaaagctacttatttttccaaaaaaatgggcataaaaactgaacacttaagtgattatcataggttacacaaatcagaacgttaatactaacgaccgcgtaacccttgatggttaacaagaataggtgcagtttctgtcactaaaaaaataaaacctacaaaaaaagagctattaaactttagtttaatagctctttccattctaggatgttatcaatatcacccgtacggggatcgaacccgtaactccgccttgagagggcgacgtcttaaccaatttgaccaacgggcaataattggaacacctaatatattagcgaataacacccgtaatgtcaattattaattaaactagataaaaatcttatagttccggtggttaatagtaatcgattcctttgtgactttacgattggttttgcgcttgagattctgcagaatattcaatgcatagtcacgatgctgttcaattaaggccaacacatcattttcaatcgataactccaatagtttacgtgaatcttgtaattgaatatgaacttggttctgatcttgggaaatcacctttccctgaaataacttttcaacatctactttattcatatcgatagcctcccatatcagtatagtcctttttactggttttgttaaaaatcagaattgacaagcgttagggcatgcagtatcatagtattcgttgataacattgggtattcgccaaattggtaaggcaccggactctgaatccggaatttataggttcgagccctatatacccaattgtattttcgctaagtctgagaaatcaggctttttttgtgtgtttaaatcattttattctcttaattgcgtaaatttcttctatataaatagcttttttgttaactactatctgattggccacccaaccagtaattcgacccgttatcggtgccaaaatctgaccatcccggttgcgctgtgctaggtccaccgtgaccatcgtctttttaataatcgcctcgttgattacctcactagtctgtttagcagacatcttagcaagatgtgttcggtgcaactgcacgtcagcgatgctcgcttccttggcacgtaccgatgtatgatcacttagataaaacccctgccacttcatcatgccccgatcgtgataatcatgtttcagaaattgcgtcactagtttgttatcaaaacgtttagtcataagcattgccgcccgcatgaccaccaacaagtccggcccgttcaatcgcggttgcacccttatccttacttgataatttaaccaaagacgcaaaaccaaacttctgtcgaatttcgtcaaccgtttgatctaattgatgttgctttaaatgacgcaattgcggatcgaataaatccaactgttgcacgtcatcgtcaatcaattggccacaagtcagactaatatggcgaatggtctgatgttgccactgctctcgaaataattgaatcgctgttgtggtaatttcatgattaccattagtcggttcaattttcaatgatcgtccaaatcccgaatggacaccactttcattttcagaaaaagaaaagccaatccccaaactaatcatacacgcctgtttacgatgcgcacgtaaccgcgcagcaacctgttcagcgatttctctgataaccacttcaatttccgtttgtaaaaaataatcacgtggtagtacctgactattcccatagaagcgctctttgggcgtgtatttttgatggacaattgcgcgatcaatcccccagctaaacgcaaataattggctgccaataatccccatcttttgttttaaatcatatggattagtatgcgctaagtcccccatcgaatgaatctgtaattgatttaacttcgtcgccgtccgctgacctattgaccagacacgcgctaaatccgttacgggccacagcttatcaggcacatcttcatagtgccactccgcaattaaactgtgattatgtttagcttccaagtccaaagcaagtttagcaagcaacgggttatcgcctatgccgactgtcaaataaatccccgtttcttttttcaccgtcagttgaatctggcgtgctacttcataaggcgtttgaccaaaaagatgccaactcgtcgttatatctaacaatgattcatcaatcgaatacggttggatgtcttcttctgccgtgaatctttgaaaaatacgattaatttttaaattttcttctatataaaggttcatccgtggttccgcaacaatcagccttttatcatggaccggtacttgagtcgctcgggtcacattactgataccaaaaagttgtttagctcgtggactagctgccagcaccaagccactgccagcgtttttggcagttgacatcaccaccaaaatcgattttaacggatttagccctctcttaactgattctacagaagcgtaaaatgatttggaatcaatcattaatataattcgtcgcggttcatcagtataatcatacattactcactcaccgcatttctaacgtagtacttatcaatcacgagttggcttctacaattatagtgtccaaaaacggcaatgtgcgcattctgctccgcgacatacattaaattaaaagcatccttggcaaccaagcaattataattttgagtggttgtttgtaatgtaaaccgaactaagtacggatcaaacgaaataacttttattgtactgccaatcgttccttgaagactaacgtactgcataattatcccaccttctcacttatacaatgcccttggttaaagtttggatctgttgcacttgctggtctaattgactttgccagcgatttatttcaattaaagtgacttgtggtaaatgttgtccaataaattgcggaaatttactacgattgtagtaatagttcatggcatctcgtaaatcgcttgattggcctgcttgttgtcgtaactctaagacgccaaaaccatttaaatataaacttaaattctgttgttgcaaatcaattatgactcgacttgtttgcatcaagatcacctcaatcatctgttctcttgttacattataagaacgtacattcgcattagtcaagtttaatttaattttaaccataaaaaaagcagcggcgtcagccactgctttttagtttaaactattttatcttaataccaaccgtttgctaaccagaagctctttgcgccttcccatgaaccataacggcttgttacatattgatctgcaacgcgttcttggttacttgctgagtagtcaccatttaagtatgagcttgataattggtaacgaccaacgaattgaccgttacttgctgagtatgaaccacctgattctttgttggcaatccattctttagctgagttagttgttgatgttgttgtgtttgtagttgtcgtagtagtcgttgtttgttgttgtttaacaactggcgttgttgttgcttgttgttgaacgggttgtgtttgtgttgctgctttttgaacaggttgttgtgtagcaacaggtgttgttgtcgcttgtgttgtttgttgtgttgccactggtgttgttgtagctgcttgtgttgtagcaggtgctaccgtaacagtttgtgtttcttcgtcgattgttaatgtttcgccaacatagattaagttcttgttagcaattttattagcgttagcgattttttcgatcaagctgccgttaccagcaaatttttgtgagattgatgataatgtatcaccgctgacaaccgtgtagttcgtagctgcatcggcatggccgttacttgcgaataaaagacctgcagttgcggcagttgataatgtagcgctgaataaaagtgttttaagtgatttcatattgtgtgtttatctccttgttgtttcaaaagtttatttaatgtcgtattaataacgtgacattaatataccatctaaaaatcatttgtaagtatcaaacaagtaacaattgatgacaatcctgtaacaaaacaaccgattaacgacctaatctgtaatattgtaccttacgatgactggtaatataggattcttatccaacaaaaaaacgacttaaaaaagtcgtttttttgcttgtttttttaagattcttcttgtcgacgcttcaaatggtacttattaattgctttttggcgtcctaaaactaacggaattcgttcgacaaagacatcactatactctaatccaaaccaagatgctggcgtatctgtaaacttctctaaccataaacgaatttgaacaatgactttgtccattgctctaatttgtgtttcaggtgataagtcctcttgaatgatcacaaacgagaaatcaccaacttctcgattaggaattgtcgtgtaatgttgtggttgtgctggtaattcaccattatgaatcatttcatggatgatttggcgaataaagatatttactttttgttccatcttaaagcctaaatacaattggacactgacaatgtaatccgtacctaatgtatcaaccgtgtactctgcagtgtaaggctcatctgtcacattcacagcaacaaaccaataaacctgagcacgcttaggccgtttatccaatattgaatagaggatattctttttcaccatattcttgccccggggttctgcctgaggttttgaaagataaactaagtttgttgtatacaatggtaatgacgtttcattccgtaggtcatgtagttggcgtttatacgctaatagtgacactgtacttgatttaaaggtattactttccttaatcgaattactccgataccaaacaaacatgatgaataaaatgacaaaggcgattaaaactgtcacataaccaccatgcataaatttagcggcacttgcaataaagaaaatcgtctcaattgcgccaaagaatagtaatacgacataagccaagaaccaccgcttctcgcgtcgtcccaaataatggaacaagagaatcgtcgtcattaacattgtaatcgtaattgctaaaccgtaggctgcttccatatgagctgagttcttaaaatagaaaacaaccgctaaacaaactgcccataagatccagttcacaattgaaatatagagttgcccttttaatttagcgggataatcaactttaatccgtggcaataaccgtaacttaatcgcttcagaaactaacgtataggatccagaaattagagcttgcgacgcaataattgcggccactgtcgctaaaagaatcgctggaattttcaattgtgccggcattgcttcaaagaatggattgaaatctgtcatattttgataagcggcaacttctttgtgctgtaataaccaaacaccctgtccaaaataattaaggaccaaacaagcggcaatataaggccagctaccatagatattatgccggccaacgtgacccatgtcagaatagagcgcttcggcaccagtggttgccaagaagacactacctaatattagaatcccaaccttattttcaggactaaataggagatgaattgcgtagtaaggattcaatgctttaagcattgttaaatcccccattaaattcataacgccaatcgcaccaataaatgtaaaccaaatcaacataattggcccgaatgatttaccaatcaaatcggttccgaacttctgaataaaaaagagtactgataaaattgtgacagttaaaataatcacttcacgttggttggaaaccaaaacattgccattaatcggcaatcccttcagtccttcaatcgcagttgtgaccgtcacagctggcgtcaacatcccgtcagctaataacgtcgccccgccaataatcgctggtatcacgagccacttagcttgtttacggattaacgtatacaatgcaaaaataccaccttcaccgttgttatcggcgcgcagcgcgattaatacatatttaaccgttgtcattaacatcaatgtccagaaaacaagtgagatgctccccaccacaaaatcctgactaatattacgaataccgccattgccctcgacaatggacttcatcacgtacaatggtgatgtcccaatatcgccatagacaacgcccatcgtaattaacatgccagcgattgacaatttttgccgggttgttttcttttctgttgccaatttcatcttcttacttcctttacttagatattagcattatcgtagcttgttctaggcggaatgtctagttatatctataatttctagttgttagtctccaactttattaaagatggtgtttcatgctataatagatacactgaaataaaagaggtacattaatatgaaagataaagatcaaaagaaactcgaaatcgctaagaaacagtataaaaagctagctaatcgcccccttgctaaggaacgtaaaaaagcagttgggacatcttctatttatctgtttgtcgttgttgcggtaattttaattgcgctagccatttttcttaaacagcgttaaatcaaaaaaggttgctgaagcaacctttttttgattgaatgttttttatttaccgtctataatgaagtagttcactcttttaagcttaactgcttatctaaaacacgaacattatccagaaaggcggctcttatgtctaccaacaaaaaaatctatctcgcaggtcctttttttagtcctgaacaaatcgaaagactcgacaaagttgcggctctcctagcgcaaaatccaacagttgagaccgaaagtattttccgccccaatcaacatagctattcagaagctgaatttggtagttttgaatggcaaaccgctactttcggatttgatattcgccaaattgatcaagctgatctcgttgtagcagtattagactatcaaacagaatcaggtcaatttgaacccgactcaggaacgatgtgggaatgcggttatgcttttgcccataacaaacccgttgttttagcacgttataaagatgatttaccgattaacttaatgttatccggtagtgcgacagctgtcttcaacggcgatgcagatcttactaatctagcaacttacgactttaacgcgcttcaaactaaatacgttgcaactaaaatttattaattaaaaaatgtctcgctaaactattcttggtctagcgagacattttttttaattagaacccattattttccgttaattgacgataccaatgaccacttttcttcatagtccgttgtgcattatgctccagatcaacccggaagaaaccatagcgatttctaaacccgtttaaccaagaccaacaatcattaaacgtccaagtatggtagccaaagcaactactaccatctgcaatcgctcggtgtaattggcgtaaatgttcctgcataaattcaatccgatagtcatcttgaatctcaccgtctgcagccataaaccgttcttcatctgcgacacccatgccgttttcagaaacataccatggaatattctggtagtcgttcttcatcatcatcgcaacatcatacaaggcttctggatagatttcccagccacgatatggattaattcgccgttctggccagacgtaattctcatagaggtcatcggtcgtcaacgccgggaagtgtggattggttggtgcctgtactcgcaatggttggtaataattaacaccaatgaaatcaacacggttagccgctaataaatctcggtcaccgacttcagtaacaggcgtcaattggtgttccgccaacaacgttatcaaagcaggtggcacctggcctaaaactgttggttctaagaaactcttagccaaaagtaaatccgctttttctttagctgccaagtctgctggcgcatcactcttcgcataagctggtgtaatattgagaataattccaatttgaccgtctggttttacttttctaaattcagcaaccgccgcagcgtgtgccaacaaagtatggtagccaacttgaactgccttcttgaaatcaatgatgtctggataatggtaacccgttaaataaccacattcaatatgaacgattggttcattaaaagtcgtccaacggtccaccaaatcaccaaataattcaaatgctgttttggcatatcgcgcaaaggccattactgattctcggttttcccatccacccttttccattaaccaccaaggcatgtcaaaatggaataaattgatgattggtgtaatattagcagccttcaaacgttcaaaataatctcggtaaaaagcgaccgcttccggattaacatgttccccgtctggcattaggcgggtccaagcaattgaggtcctgaatgaattcaaaccaatcttttgcatattttgaacgtcttctttgtacaatcggtaagtgtcactggctgaatcggggccctggtcgccattaaacttctcagggtgcatttcaaaccatttgtcccatgttgaggccgacttaccataattaagcgcatagccttctgattggggtgctgacgtggctgcgccccacataaaatattccggaaatttgatcattgactcttctcctttaaaatgtaatcggcatcatttgttataactttattgtagcatgccttgttttaagtttcactaaataactaatcgctaatcaggcgggtttgcaatcgctgtcattgacttattttaccatttatcattattttttatacattttttatgttttatgcgtaatttgctttaattttagtggtatttatgatatattttagcaagaatgattaatactcccccaagtaagatcatttcgatactcataagatacccggctcactctcttccccaattagagtttaagtcgggtatttttgtgtaaaaaaaatagccctcacggactatttgttaattatgcaaaaataaattgatagattcctgcaccacagattgcgccgataattggtgcaacgactggtacccaagcataactccattgtgagtcacctttgttcttaagtggtgtcaacatgtgcaccaaacgtgggcctaaatcacgagctgggttcaaagcaggaccagttgggccacctaatgaagcaaccaatgtcataactaataaaccaacaacgatgtgtccggcagcgccaaacttaccagcaccaattgctaaagcaccgaaaactaagataagtgtcccaaggaattcatttacaaaaccattcatacggctatgagcagcatcaattgtaacgaatgagcctaaaataccttcttggtttgttgtacgatcataatatggtttgtaagctgcaaccaataataattgaccaaccattgcgcctaagaattgaacaatgatatatggtaagacattttcccatgggaataagcccatcactgcaaaactcaatgtcacagctggattaagatgattaccagaaatgctaccaaacataacagcgggaatcataaccccacatccatatccaaaagcgattaagaaccaatcactactaaaaccttttgttccctttaattcaacgttggctactgccccgttaccaaaaataatcataattgcagttccaataaattcggcagccaaacgggttgtcaaagaagcatccactactatttcctcctaatgttaacataagtatatatcacatgatacgtgataattttcagaaaaacaattagcttttctaattaaagcccttttatgaaaaaatttgtccttttttcacattattctattaaaaataacttgcttaaattgtgtaaaatgggataatattcattggctaaccatggtaacgctgattatctaattggaggtcactttatgaacttaatgttagccgttattctctatttcggcttagccatctttggattgggcttattactactcttgttccttcttatctttaaaaaaagcattaaagccgcgttgattattgccttaatcgggttgcttgttgcggccgcaccggttggttatcaatactacctctcccaaaaagccgcgcatgaagcacaagttaaacttgaaaaacgtgagaaaagctttaataaacatgaacgtcaatttttaaaacatatcaagcaacagcttccacagaatatgttgcccaaaaatacactgctacttgggaaacactgattaaagacggttccgttacaatcggtgattcaacttatactgataacgaaaatgcaatcgctggtgaagggcgtcgtctagttgctaagggcaagctcgatgatgctgataattattacgctattgcccaaactgattatgaaagcatgaaagactataagacaagtcataacaaagaacggcttgtctacgctaaaaacgttttggcaaagactaatgcttttatcttagctgcaacgcgtcctaacagtacgtatcaagattacgcagatgatatctataaaacaaataaaagtcatgtccgtgcgattgatcagttaaaaaatgcccgttcaaccgctattaattagcgaaactaaaatatcatttttcaattaggtgccaacagtttacgccattcaaataaaatgctggggagcattttatttttgaaactatggttaaccccattacattttggagggtaaaaaaatgcgtcgaataacactagttagtttattagcaagtcttcttttactacttaccgcctgcggaaaccccgtagcggttaagcttcatgaaaatgggagcgggttcaatgcaaccgtgaccggtaaaaccaagcaaaaacgggtgtactggcaaattggcgatcaaacccattcagtcaaagtgactgatgggacttttgaagttgatattccctacaaagccaaagaatatcgtgtcacatttgccgataacgaacagcttaataatccaacatacttgcaaggtcctgctgcaacacctattacaaaatggtctactttcatcgcacgttacaatcctttagcacgccaaaaaaatttaggcgtttttgatgctaaagcgattgaaggtattcgctcggatcaaattgatgatcataatgttatctctatcaatgctagtgatggacaaatcttaggaatttccgttaaatcgctagatgcgaagaacaaccttgtctttaaaaactatttggaatctttcaccgctagcctgggcaccgacaacaagcaagttacaacgcttgtaaagcagtccttcaaccgtcccaataaacttttacaattaacaactaaaaagattcgctattcaatcattacaacaactaatcagaaacataaaatgacacaacttgccattacgcacgttgaatagggcaataaaaaagacctgaagctgacaatcttcaggtcttttttatttaattaaattatataagtagtttttaatttcgggagaaattattcataagttcagtataacccatcgccataattacgtaaacgatcggtcaagcacaacttaataccaccaaatcaaattagcagaaaaaactaatccattatgttatatttaagttattaagaaggaggtttttatcatgttagaatatcataatattttagttggattagacggttcagaattagctgataaggcgcttaagcaagcgatcgaagtggctaaacgtaatcatgccaaactttttattgctcagattattccagatgaagtctctgtcagcacaagcatcacatatccctcttcttctctagaggccgaacgaaaatcaacgaagctctacttagaagaaaaagccaaggaagccaaggatcaaggcgttgcagacgtccaaaccattttcaaggttggttcaccccgccgtgaattagccatcactatcccacaagaagccgatattgatttaaccattgtcggggttagtggtaaaggtgctattgaacgattgctcattggttcagtggcccaatttatcagtattcattcgaccacaaatgtcttgttggttaaataaggcgaacgaggctttaaaattcggtaaagattgtcatactcgttaaagcgcccccaagaccgtttcattcgtatttaacatttatcaagcattgttattgaccaattctattaacaaagtactcttttttacgcaccattggccgacgataattgattattgattgttaataacacccttgctaatgttaataattgttatataatgaaggctaaatcccctcttaacaactatatttcaagtaaggagtgttatgtgtggcatttgatattactaaactttcggatcaacatcttaaggccgcctggcacaaacatcgaaaacaaatcttaacgacattagtgcatcctaccacctggttcgatcaaattaatcacctcttgatggcctttttcaaataattaataagcgtctagtcttaaacaaaattttgtttagcactaggcgctttacttttgcgctcatcaatggttgtcccccatacaaaatggtatactgctatataagaagtctttataatattggaagcgaggcttttttatgattgctgtcttattagttgtttgcgaaatttttattagtacggcccttattttctggaccaagcacacttggaatttacccgtccttttaatgggcggcgggctcatcctactagcccttctcacacaaatgtggtggcaagttctgtgtatcagtttgctgataactggctttgaactactcgccagccactatcatctatagcaaggagtactgattattgaaactaaaaaagaagcaccgtctaagattattagggatactactgatggctggcattggcctgttgatggtccaagcgcagtttggtaagcccctattaaaaatacaaaatgcccaatccgcacaagatatcactaaaaaacctaaaaaagtcctgttagatatcgcacccatttctcaatttccagaattaccaactggctgcgaaatcacggccgtcgcaatgctgatgacttataaagatatcgacttacccaaaacagctatcccagaattgattccctacacaaccactggcgatatggagaccggtttttggggtaacccatttgatgattccggttataccatgtacccacctgcttgggccgatttattcgatcaatatctaggcagcttcaccgatctttctaatgcatccgtatcgaccttaaaaaagacacttgatcataaaaaaccaatcgtcgcgtggattaattatcacgggcaacctgctcattccgttttaatcgtcggttatgaccaagagcacttctattttaatgatccttacacagggaaacgcaaaaaaatgacatttaaggccttctggaagattgcaagttaccaaggccaccgggcaatgacttattaagtttaattgggggaatttatcatgtttaagcaccaaacactaacactattattcggcactagtcttttattactaacagcttgccaagcaaaacaacctagtacgcactcagtggcatcatcctcagctcaacaaagctcacaggttgctcattcaaaatcatcttctgcagaaatggtttctaaaaccactacttcttcagcaacaactagccataccgttcaagaaacgactcacacttatactgatagtcaaaaagcagcaatcacccatgatttcttagagtgggccggtcaacgtgctgaagttggtaatatggctgttagtgactggtactttgaccacggggctgacgatcctggtgattggtttgccgaaacaccggatggccgtgttttagtccaacatggtgaaggtgacgggcgccactaccccattcaagcagttggtggttgtgttttttacaccgcattagatggcacgactggtatcgattcacaattatacgattcctacgccagaaattatgctagcaatatgaatatgaaccgcccgattagtaagtatttattaggtgataacggtgtcgtttacgaactcaaaacgggaaatgggcaaaccacaaatacggaagatggttttgcattagccccctttagtggtagccgaaatacgtcccctacaccatttaccgtttcacaggatacggctgcgcaacaagaattaaaatcgttgttagctgcctattagacacattttaaggagaattcaatgaataatgccgctttattagaatacctcgaagcaaactcccgcgctctcgatacctttcgcgataagagcctcgattatcaaaatgaaaaaaatatgaagcgtcaacctgccaaacgttggaatgaagctaaggttgatcgtgctgtcgataagatggtcgccgaattcatcgccagtatccaacaaaagatggcttttaacattcggggtgagcatgctgatgactatcaaacttgggttgatttcatcgaacaaaatgaggtcctagaaggccttgaagaatcagtcaatgaaatgacatttgaataatatagataaattaaagtcgggtcaagcatcaatttggcctgactctttttttatacactaaaaaagcgactaaaaattaattttagtcgctttctttaaaacgaaatactatcaattataggcgttcgtttaattctttaccaagttcttcgaagccaggtttgcctaataaagcaaacatgttcttcttgtaagcttcaacaccaggttggttgaatgggttaatgccgttcaagtaacctgaaattgaaactgccatttcgaagaagtaaatcatgtagcctaatgtataagctgtttggtcaggaatattaacggtcataacaggtacgccaccatcagtatgtgctaaaacaacaccttggtaagctttcttgttaacgaagtccattgtatggccttctaagtaacctaaaccatctaagttttgttcgtcagctgggatgtcaatgtcgctgttaggtttttcaacgttaacaacagtttccatcaagttacgacgaccttcttggatgtattgacctaatgaatgtaagtcagttgagaagttagcgcttgaaggatagatccctttttggtctttaccttcagattcgcccatcaattgcttccaccattctgagaagtattgcaatgttggttcgtagttttctaataattcagttgtgtaacccttacggtataagatgttacgtaatgcagcatatttgtatgcatcattcttagtaacgtctgtatctgtatattctaagcgtgcgtcagcggcacccttcattaattgatcaatatcgccaccagcaacggcaattggtaataaaccaacagctgttaatactgagaaacgaccaccgatatcatcaggcacaacaaattctgcatagccttctgcatctgattcagtcttcaaagcacctttagcgcggtcagttgttgcgtagatccggcctttagcttcttctttaccatatttcttgattaacttatcttttaagacacggaaagcaattgaaggttccgttgttgtccctgattttgagataacgttgattgagaaatcgcggtcaccgatcaagttaactaagtctgataagtagcttgaactaattgagttcccagcgaataaaacttgtgggaaatcgcgttgttctgctggtaacatgttgtagaacgtgttgtttaagaaatcaattgcagctttagcgccgaggtatgaaccaccgataccaattgccacgaagatttctgaatcgctcttaatcttagcagcagcttctttaatccgtgcaaattcatctttatcgtaattaactggtaaatctaagaagccacggaaatcgttgcctgcgccagttccttcacgtaattgtgaatctgcagcattaaccattgcttgcatttctgcaagttcgtttgattgaacaaatttgtccaaacgtgatgcatcaaatgaaatatgtgccatagtagtctattcctcctgtttttaaaacacaagtatacttaataactttagcttttttaaaggtaaaatgcaagctagattgcccccttgatttagaaaagttgaatgatgtattaacggcattaccgggtgaaaatctgttaactgcattagaagaagaacgtggaaagggcagaaatgattatccagttcataccatgtggcgtgctttcgtagctagttttgtctttcaacatcgctctgtcgcttctttgattcgagagttgaagcggaatagccaactcagagaactatgcggatttcacctcatttttcgcgctcacaaaaaggcaagtatagggttcaactagctcccacagaagctgctttttctcgatttttaaaaaagttactgctccatcaacacctattagatgagatgtttactgaattggtcactactttatatgaaacactggatggatttgggcaaacgttagctttagatggaaaaatcatcccttcttatgctacaaaaccaaataaaaaagtagaacatgatggcagaagagatactgaagcagatttcacactaaaacaatataccactacgacagccaatggcgagaagataacaaagaagaaaacatggtttggttatcgacttcatttaatcgttgatgcaaattatgaattgtctgtagcctacgaagtgactaaagcatctgaaggcgaaccgacggtcgcaaaaagactgatcaaacaattttctacctcacaaacgaaacagtgtgactatcttctagctgacagaggatatgatggagctccattattaagtctcattgaatctaaaaacatcatccccgttattgatattaaaaaccagtgggataaagatacgctaacccaacaatatcgagatacagatttaatttatacgtataacggagcggtttcctatgtcgatgaaaaaggaaatgagataaagctagcgtatatgggacatgataagaaaacagattgtttacgttatggatttaaatctcaatatcaggataaccggcttttcagaataaaatgtgaagaagactgacgtatatttaacaaagtcgctagggatagttttaagttcaaacgaatctacaaaaagcgaacctctattgagcgagtaaatggacgaatcgatcgagattacctatttgagaatcatacgatacgaggaaaaaagaaactgaatctttttgtgacgatgacttttctcattatgttagcctttgcgaaagataagatcagtaaaaaccatctagcttatctaactgcttgggtagcttaatttttttaaaattagaagggatcgtttgtttgacgtacgcaaaaataaaagcggagtaaaaaaacagacacttttttacacaaaccatggaatgaactgactactttccgctattttacaaataaggaagcctacggcttatttcgatgctagttattttcacaaaaaatggtacaacgtaatttattctaaaagaaacttattttaaaagaataacagatggcggtttttcattatcttgaatatgaacaagattattctgggaaagtccgaatgctgggctattgaatagaaaccagttaaggcagtggtgtataggttctttttggacgcttaaaaaatgaactgttttatatggagtattctggaaggatattagtatagacccagtgagccagcctctttttcattttctaggtacctttctattaggcgcttacgttactctaacaattaccgttatcaatggaatttaaaaaagatgacccctattcaatataggaggcatcttcaagcagcttaatctctttttttattgtgtccttgacatgggtaccattttatcgggagctctctaccaaacttttatttttaaattattctttaaacaacaatgctttactatttggatacgtaggaaattggttcattggaacggtccagtcttgttcgggaatactaaagttatatttatttactaattggtcagaaaagacacgcatactgtgaagagtaatccattctcctgcacaacggtgcatatttctaaattctcctccaccttgcgcaatcatttcgtattcttcttcataagaaatttcttttgtttttccaatatatctcttgatatcaaatttttctggatgatcaatcgtacgagcgtcatggtttgtaccataaatatctaagacaacccagctatcttttggtatttcgtaaccatcaatttctacatcacgaagagcgattgctggtaacataggaaagaatggatagtagcgacgcatttcttgaataaaggaatcttgtagggtatcaaagtcttcttttaattggtcatacaagttcgttttactgaaaagcgcatgccccattaaggccatccaaaccgtcagtgctacagtaggacgaatgatgtttagcaattcaactgctgcaacctctactggtaataactctccttctaggtcttctgcttgtgcgaatgtatagagggcaagattttctttgcctggtacaggatttttgcgagcttctttaattaatgattgagcccatccctctgattcgttacggtcttttactccttttaagtggttcgttggagaagtgatggctccgctaatcatggatatttgattactagcaagcttatcgatttctttcggatcatactgtgctagattaattccagcccattcacaaatagagttaaagagaactcttttagaaaggtcgaataactcaaaagtgccatgttgctgatcgagttcggttgcaagattttgatctagaatagctctatagtcttccatacgttctggagtcatcaaatccatgaaataatttttacgttgatggtgtttctttccatctatcgtctgtacgccgtcttcaccaaataaagttttcaatactacttttggcatagacccttcccgcttgaagttttcaggattataaaatttacgcgctgcttcttctccataaacggttgtaatttcttctgtcagaaattctgcttttgctactggagcatctgcttcttcacgaagctcacctaaaaggttataccctttattaatcaactcctttacatccgttagtttgatttttgtttctggtacttgtttcattatttcatctcctgtttgttttatttctaccaatacaaacgtactatcttaaacaactcagtgtcaaaaatactgctcactggctttttcacgcaagttttgctttcttttcagaatttattttcttaaaggccttgacttcattctggcaagccgctatacttttcaacatcaaataaaacggaggttactgaaaatgacaaacactcacttagtacaattgaatattcgttggcaaagccgctaagtgagattgtataccgtcgtgggatacagtcttttgattgtatccatgcggccattcatcagtaatcgattgaattttaagcctacatggattttactcgaggaaatccatgtaggctttttctgtcccctacatgactatgtgggggactttttttatttgagaaataagtgcgttcagcctggttatactttgaggagtagcctagtccagtgaatgaacgatgtaatcgttcgtttgcgggacgtagctaaccgcagaagtatgggctgaaaagcacgttaaaggagctttcgtcaatgtctaaactaaaacgttttttaccactcattttaattttcggtagtttactcacactgctaggtatcaaaaaaattaaagaagcccaccaacctgatttgccaaccgttggtattttacagcccttatcccatcccgcacttgacgaaatccaccgcggtattgtcgcaggtttagcgagtgccggctatcataatcatcaaaatattaaaattgattttcaaaacgcacaaaacgatcaaagtaacttgcgcctaatgagcaaccgctttgttacagaaaaggcaaaagttaccatcggcattgcaacaccagccgcccaaagccttgctaacgccactaaacaactgccaattatcctaggcgccatcaccgatccggcaagtgcaaacctcgttaaaaataaccaacatcccggcgccaatatcaccggcgtttccgaccaagcacccattcaaaaacaactcgatttaatgcaagccatcatgccgcagcttaaaaccgttggtatcttatattccagcagtgataactcggcaaccagtcagatgcacctattcaagcaactcgccaaacaaaaaggcctccaagtcattgatgcaagtcttagttccgtcaacgatctggaacaagtcagccaaaatctagcgcctaaagttgacgcaatttacgtaccgaccgataacacaattgccagtgcaatgggcacacttgtccacgtcaccgataaaactaaaacaccggtctttccttcagctgaaacgatggttaaagacggcgggcttgccaccgttggcttgagtcaatatgatttgggcgttgaaaccggcaaaatggccgctgccgttttaagcggtcgttcaaaacccgcttcaacacccattcgctatttacgtaaaggccaccttgtcttaaatctcaaaaaggccaaagacttacacatcaccattcctcaaaatcttgtcaaaaccgctaaagaaaaaggagcgattatcaaatgagcctcattatttcaaccatcgaccaaggattattatggagtttacttagtttaggggtcttcattaccttccggatcttaaaatttcctgatatgactgtcgaaggtagcttcccactaggcgcggcattaagtgccgtcatgctacaacaacacaatatcgccctttcgctactcgttgcctttgttggcggttgtcttgccgggttagtcactgctatcttatacaattattttcacgttcagagcctcttagccggtatcttgacgctaaccggtctttattcagttaacttgcgtattttaggccaagccaacctcgcaatcggtgatcaacataatctctaccaattgccttttttacaacaattcactgtcgatcaacggctactaattttgaacctcatcattattgtcgtggcgatgttggcccttgccttattactctacactgaattcggacaagcactgattgcagccggtgataatccgacaatggcgctctctcaaggaattgccgtcaaacgaactaaaacgattggaatcgtcctttccaatggtctcatcgctttagcaggtggtttggttgcgcaatataacggctttgcagacgtcaatatggggattggcgtaatggtcattggcttatccgccatcatcattggtgaacggctattagtcggtcaccacttcatttctaaattaatcagcatcatccttggcagtatcgtctaccgtttaatcttactattggtcctccaacttggctttaatgctaatgatttcaaactgttctcagccattatcctcgccatcttcatcattgcaccacaacaaaagaaaggaatgaccacaaaatgacgcctcgtatgactttaaaccaaataagttatcaaatatctgatgataatgaccaaaaacaattactcgaccagttaagccttgacatcaatcccggagaattcgttgtgctactaggagccaacggtgctggtaaatcaacttttttcaacactgttgctggtgatttaacgccgacgagtggccaaattatttttaatgggcaagagattaccaagcaatctgcccaacagcggacacgtttaattagtcgtgtttatcaagatcctaaattagggacagccgctgatatgaccgtcgccgaaaacatcctattagccatgcgtcgtggtcagcggcgtcgtttgttgccccgtcgtctaaaacaacaattaccgcaaattaaggctctcgccaaaacgttacccaaccatctagaacaacagcttaatcgaccagtcagtaccttatctggtggacaacgccaaaccctaaacttcttgatggcaacgattcaaaaacccgaattgctattattggatgagcatacatcggccttagacgccgtttcaagccaggcattgatgacttttacagatcaaaccattcaggataatcaactcacctgtttgatgattactcatgatttggaagatgccttgcgttatggcaaccgtcttttagtgttaaaagccggtcaattaattgctgattttaatgcggtggaaaaacaacaactaacaacggaaaaactccttaattatcttaatgcctaaaaaataacaagcgttcctagttctgaatcatgttcagaatatgggatacttgttattttattttgtcacaataccagtaattagttcagtccgttgataaaagaagcgaaacgcttgtaatcgatttcaacgtgtgctaaattatatgtcataaggttgtgcgcaacctaaatcgttaattcacttaaaggagttcttttactatgactggtacaaatactaaaacgcaagaaactattccagcaagcgttgcaatgcttcgcgttcttgaatcttggggagttgaccatgtttttggttatcctggtggctcatttaattcaacaatgcgtgcattaacggttgaacaagaccgacttaaatatatccaagtacgtcatgaacaagttggtgcacttgctgccgctgctgatgctaaattaacgggtaaaattggggttgcttttggttctgctggtcccggtgcaacgaatcttttgacaggcttatacgatgctaaagaagatcacgcccctgttttagcattagttggccaagtcccaagtacaaatatgaactacaactacttccaagaatttaatgaaaatccaatgtttgatgacgtttccgtttataaccgactcgttatgacgccagaaagtctaccatatgttgttgataaggctattcgtgaagcatacaaacacaagggtgttgcagttgtcattattcctaataactttggttacgttgaaattccagacacaccatacagctcaagctcaccaacagatcgtaaacaagttgcaggtcctgttgctactgatgaagaagttgaccaattcttagcaatggtcaaagatgccaaacgtcctgtgatccacgtcggtcgtggaattaaagatggcggcgacaaactcgttgaattatcgaagaaattacaaattccaatcgtcatgactggtcttgcaaaaggcttagtacctgatagttatgaaggtaacttaggcatggctaaccgagctgcttcaaaagctgccgatgaaatcatggccgttagtgatcttgtgattgccatcggtgccgacttcccatttgctaacttaatttaccggacacacgactttaaattcgttcaaatcgataatgacgaagcacaatttggccgtcaccatttcttagattttggtatctggtcagatgcaactacttttgttgaaaaagtggttgcccgtagtcaagctgctgcaccaagtccattcttcaaggctgccgttgctgatatgaagaactggcaagcttatcttgatgccttaacaaatcggccatctgatccacttgaatttgaaccaatctataaagaaattaatcggattgctgacccagatgctgtcttttcaattgatgttggtgataatatcatcaatagtttccgccacttgcacttaacaccgaagaataaatgggtaatttcagccctctttgcttcaatgggctcaggcgtgcctggtgccttagctggtcaactcagctacccagatcgtcaagtcttcaatattgctggtgatggtgccttttcaatggtgatgcaagatttaatcaccgaaaagaaatatcaattaccaatcatcaatatcatcacttctaatgcttcattaaacttcattaagagtgaacaagatgatttaccaatggattattcaggaatctttatcgaagatcaagacttcgcgatgattgcccaagcaatgggcgttgaatcaatcaccgttcgttcttctaaagaattacctgccgcttttgacaaagctcttgaagtcacaaaagcgggtcgcccattcttaatcgatgctaagattactgacaaacgtagtatccctgttgaagaattagaattaaccatcaaagatggcaagcttacagaatcaattagcgcaagctatgatgcttctcgtcctaccggcaaagaatacagcgttgctgatttcttcgctgaatatgatggtcaatcacttaaaacattgccagaattattcgcagaaaatggcgttaaactctaatattttcaaattaaaaagcatcctaacacatattaggatgcttttttgatactttaattttcagcaatcgtttctttgggatggaaccaaacaacgttcttatcgaaaaatgacactaaatcgtttgataagtacaagatgtaggtaaagaataggacccagttagaaccgccttgcatcgctgtgatgccccataacgtaatcgaaacaatactttgaataaaccagaagtagtaactttctttaaaacgtaacgttgtcaataacgcaccagtaaagccaaccgaagcggcaacactatcaatcaacggccgtgggctatctgtcatattactttcccagagatataacaaccctactgaagcagcgaagaataataacgtcagtacccagttacgaagacccttaccgcgactcgcaagaccacggacttttttatcgacattttgtgcccaatctggcatcaataagaccggaatatctaacataataatgtagactgtttgtaataacatatcattatagtttttagcgttgtaagccacaataatgtagattaacgcagaaataatcccaaaaacaccatttaagggtttggtattagtgatactaatcgtacatgtaaaacctaacatgcccgcaaacatcgttaagattgaaacactgttaattggtccacctgaaactgtggcagctaaaataaaacccaaaccaaacattaataagccataactggctgttgtccagcccttcatttgttggatataccactttggattaaatacactggcgattgcacgactatcttgcattgatcaaaaaccctctttatgtcaaattagttatttattcagatcgtcaacaccattttctatatcttggtgcctttaaagaattaacaacactatatatagtacacgcagactttttaaatttaaactcttgtatttaattcaaaatatggtagctctcaaatcataatttttagaatacctggtaatacgccaatgcaagcgctgaactagtccaattaaaaaaagatagttgtccaccttatcaattcgctcaaaaaaagtgtcgctcaatttaatttgaacgacactttttaaatactttttaagcccggtaaattgttttagcggcgttcattgccgaccaagcttttggccaacccacataaaaggccagatgcgtgataacttcgacaatttctgcctcggtaatgccgttttccttgccaatttttagatgtgctggtaactgttcgaaattaccaccagaaattaatgcactaattgtaattaaactccgttgatgcgctggtagttctgattctcgtgaccagacttgtccaaataaaacatcatcatttaattcagcgaatttaggtgcaaaatcacctaataaatcgcgacctgccgtctgtttttttgccattttaaaaacctccttttaatttgttaatacgtcataatcagcatcagaaacagcctctagccattcaggtgttccagctgtgattgcgatgtggctaaaccaactgtccttagtggcaccatgccaatgtttaatcccgtctttagtgacaatcacatcaccaggcaccaaatgttgggctgctttcccggcttcttggtaccagccttcaccaccagtaactaataaaatttgataaccatcatgatgaatgtgccaattgttacgacagcccggttcaaacgtgacattaccaacattagcattcacatctggttcgttaaccaacattgataaatagctttgcccaacaaaaaaatcttggtaagccacattcggttcccctactgtaaataattgttctgtttttaatcgttcatttttaaccatttcaataacctcactttattatgattcgaatcgctgtaaataggtttcaaagctttctaattgacctatcgactggtctaatttgccatcataccagtctattttacggcccattatcaccaagttcgcttgtagctcagcgacttcggcttcagcgcgtgctttaacctgctgcaatagcgccttgcgcgcctcaatcgttggatcaccttgcgctcgcaattcaacatagttctgtaattcggtaatccgcatccccttcccttttagatggaggataaaaccgacccatttaacatcctctaacgtgtaatagcgtaacccggctgcatcccgttgtggtttgattaaaccttgttcctcgtaatagcgcaacgtatacgttgataatcctactagcgttgcaaattcaccaatcttataatgtttttctgccaagctaaccgcctccttttaataaaccggtcgatcaccgtccgtattaggctgattaatcccccaacttgcgcgaataccaagggttggttgatcaattaggtctaccaccaccttggcgatactctgtcgtgaaatgatcgtccctttaaatggtgtccctttttccgttaattcataatcaataatcggttcgtcggtcatataagcacaccgtaaaatcgtgtagtctaatggcgattgttcaacaactgctgctgctctgcgcgtatcttccatgacatcgtgacccacagcacgttcattccacgcaccaaattctcccggcacttcatgataaagacctagcccactgatataaatcaaccgtttaacaccggtcgctgtcattgctttgacgacggtcttcattaaaggttcaaattcgccacctaaattagcataaacgatatcgatccccttcaaagctgccgttaatcgcgcttgatccaaaacatcgccttcgataatcgtcacatgcggatttgtttttaaagctgccaatcgttcagcattccgcagatataaaactaattcgtgttgcttagctgctaataaatcttgaataaccagctgtgcgacttggcctgccgcacccaatactaatattttgctcatgatcgtcactccttcacttcagtaactgtagaatacaccttctagtggactataaggcaagctttaatttaaaaaatatttcaattttgcgcaatttaaaagtaatcggttgaagtattacaaatcgtagtttataatggttataaagtaataaaggttattggaggctttactgtgactaaaaaattatctcttgctcaaaaaattaacgtcatgcgagccagtgtgatgggcgccaacgacgggattctttccgttgctggtattgttattggggttgccggtgccactagcgatcacttcgccatctttatctcagggattgccggcatgttagccggcaccatctcgatggcgatgggcgaatacgtctctgtcagcacacaaaaagatgcgcaagaaatggccattttcaacacacaactcaatctaaaaagtaattatgaatctcaaagcgcttttgtccgtcaaaaatacattaaaacgggtatcgcaccggaattagcgactaaagccacccaagaaatgatgactgctgacccactaacaactgttatccgggaaaaatacggctttttacctaacgccttcacaaatccttatgcagctgcgattgcttcatttatttcatttcctatcggttctattttgccactagcagcaattacccttttccctaatcgcattagcgttatcgcaactatcatcgcggtgatgattgccctagctattactggttatagcgccgctgcccttggcaaagctaatcgttccaaagccattattcgaaacgtcgtctccggtttattaacaatgattgtcacttacgcaatcgggacattgttcaaacaataaaaccctgctaactaatttttaaaaagcacaattatttttcctcgaaaggatccttttctatgtcgatttcaaaaacaactaccccttcaattgaaaagccccaccaaacaatggaagaaaagatgaataccttacgggctggtgttttaggttccaatgacgggattttaaccgtcgttggcgtactttttagtgttgccgccgccacaactaataatttcacgatttttatcgctggcttagcagacctactagcctgtgccttttcaatggccgctggcgaatatgcctccgttagttctcaaagtgacactgaaaaggctgccgttgccattgaacagcaacgcttaattcatgataaggaaggccaaatcaaagaagtgcaagccttctacgaatcaaaaggcgttacaccagaaacctcactagcgattgccaaagatctcatgtcgaaaaaacctttagcgaccatcgtcaacgttaaatacgatttagaactcggccattatatgaattcttgggcagcagcctttgcttctcttttctccgcagccttcggtggtgttttcccattatttgctatgattattctccctgaagcctacaaaatgacggggaccatcatcgccgttactgtggcggtttccattacagcttatatcagtgctaaacttggtgacggcaaggtcaaagtttcgattattcggaacattctaatcggcctagtcaccatggctattcactacggcatcggccaacttttctaaatttaaataactaaaaaagcctcgggacaaaataatttttgtgccaaggctttttttaatgattaattttatttatcagaaaccgtgcgattttttcatgaccggcatcattgggatgcaagctatcgagactaagagcttctgcttgttgcgcatcggcaaaagataatgccttttgattaaagagactgatatgcgcaattcctaataattcagtgacttgatcaattgccttttcgtaatcggcttgtcgataaccactttgattgatggctgggaaaaaatccgttccaattttgacatgcgatataaaataaatcgttgcttgcggataatgtttactaatctggccaagcatttgctgcaacgcgccgtaaaaagtcacggtcgtttggtcgccaagttggcctaacgggacatcgcgaccaaaatcattgataccagcatagattaataataaatctgtttcagttggtatctgttgccagcgattgaccattggatcgtacggttgggcaatcgttgagccggaaataccgagattggtggtcttaggaatcgctaaccagtccgccaaccattggtaataccattgatgcgcatagtggtttcgttgatcggtgatactatctcctaaaaccgttaaatgttgataatgtctcacctgtcattcactcctattaccgaataatctatcaattgccagttatttctttgccaataagccatcgcttgtaacgtttttagcgtctcaagctcaaccaagcggttagtcgttagactacttttttgccttaaggtactggataaatacccgaaatgacttagaatgactggtggcactgtttgatcaactaacagtaattgttgctgaatatcagcgggtgttaagtatggcccttgttgcgccgtgattaatgcacctgtcgttttaaccgtgctcttttgccacaaatcttgataagctgcttgctgtttaaggggtaacttagtcacttcatgacgcagtggcacctggtaggtctgggccaactcgagcactaccgcataaatggcaggcgttaaagtggcgacaaaatgatgtgaggtcagatgggtcagttttaaaccgctcgctaaaaagcaatcaatctgggcctgaaactcacgtctgacctcattgatatcaagttcttgttcacgtgcttgtaagttcgcatagcacatcaatcggccagctgttgtcaccaaacttgggatgttttgcgggtcacagatgggtacatccttatcaagtacaagatggagccccattccctgaatccccatttgctgagccaagaccgcactcgccgcaaaatctggtgacgtcacttgtgcattggttgccgagagcagtccccgctttaaagctaatataatcgcccgtgaaattgggatggtcatcccaaaatcatcagattcaacaataattgattgcatatggcaccttattctgcgctcaaatcgaactgtccaatgacactgtccgtcgtcactgctgctggtagtggttcggctggtgtaaacgtcgcattgctgctgacgaccatgattgtattagctttatcagctgcttttaattgtgcccagtcgattgtcacaagtggttcgccagcttttactttaaaatcagcttccacttgcatttcaaaaggtgcaccttgtaattcaactgtatcaatccccatatgaatcaagacttcaacaccttgtttcgttttaatcaagatagcatgttttgttggaaaaattgaactaaccacaccatcaactggcgcattaatcgtattcgtcatttcgtccggcacgatggcaaaaccatcaccaactgccttactagcaaatacttcgtctgtcacttgttcgattggtaaatagtgacctgtaacgggcgctgttagttggcccgcaggtgcttttttcataaatttaaacatcattcttatcctctctttattcaatttctagcataacggcttcatatggtcgtaatgtaatttggtcggtcgttaattgttggtctggataattactcatcatcaccgctttaacggccgcgttagcgcgttgttgcgtttgatctgtaaagtttgcgatcacacggacttttttatcacctaactgtcgttgataagtataaaccgcttcatcttctggtgccaataattgatattggccttcaataaggacaggttcagtcttacgtagcgctactaattgttggtaaaaggcaaagacactatctggtgcttgtgctttagtcgccaccgaataatcatccgcaacaactggttgcaaccaaggcataccagttgtaaagccgtgattggcagtcatatcccattgcattggaatccgacaattttcacgcgatttttgttgtaggattttaatcgccaaatcttcactaatcccatcagctaacatttggtgatatgcgttaatcgattcagcatcttgatattgatcaatcgaagtgaaattagcattcttcatcgcaatttcttccccttgataaatatacggtgtgccttgtaacccaaattcaactaatgccaataacttagcggattgatcacgatactgaccatcgtctaagaaccgtgaaatcgcccgtggttgatcgtggtttgaccagaataatgcattccagccaccacctgctgccatttcagtttgccattgacttaaaatccgcttcaaatcagacagacggtactgccctagcgtccactttttaccacccgtataatcgactttaacgtggtggaaggtaaatgccatcgagagttcttcacgttctgggttcgtataacgaattgcttctgaaaccggcgttgatgataattcaccaaccgtcacaaagttgttagggccaaagacgcgttcatacatttcatgaatatattcgtgaacgtgcggaccgttggtataaaagttacggccatcgtcactcggtgtctcgaaagtatcatttggaaaatctttatccttcgagatgttattgatcacatctaaccgtaaaccatcaatccctaaatcagcccaaaactgcatcatttgatagatttcttcacgcaattgtggatttcgccagtttaaatcaggcatccgcttctcgtataaatgtaagtaatactgatttagcgcggggacatactcccaagcactaccactaaacttagataaccagttattcggttcatgaccatcaactggatcacgccataaataataatcgtgataaggattgtccttgcccttcaaactttcttggaaccaacggtgttgatctgaagtatggttgaccaccatatccatcataattttaatcccccgttgatgagcctctttcaaaagccgttcaaaatcagctaagtcaccaaaaattggatcgatttgataataatccgcaatatcatacccattatcccgacctggtgagacatacatcggtgttaaccagattaattcaatccccaaatcttgtaaataatctaaacgttggataatcccgttgatatcaccgataccatcaccatttgaatcttgaaaactccgcggataaatttgataaactgttgctttttgccaccatttcatatgacgatctctcctatgccgttacttttttagtcgtacctggtttttgtggtttagccattccttgcccttcttgcatttggtcgttataaccccaaacgtaagtgacgatgaatggcacaattgtcgcaaccgctgaagcggcaatgaagatccagaggtttgataaatctgctgggtgttttggatctaagaatgatgcaaatccaatccatgaaccggcaaaaccaaacatattgccatgtaataagccgctgacaaagccaccagctgctgaaccgattaaaccagagatgaaaacccgtttgtatttcaagttaatcccataaatagcgggttctgttaccccacagaaagctgaaattgcaccagcaaatgataattcttttaaagctgttttccgagttttaatcgcaactgctaataccgcagccccttgcgcaaccattgtcgtacttaaaatagcgtttaaataactgtgcccggaagtggccacgtcgttagcaatgattggtaaaatcccccagtgaagcccgaagataacgagcacttgatagaagccgccgattaatagaccggataaccaaccactcttcaagagtaagaactgaataccaaatgctaagccgtttgataaccaaataatagctggacctgtaatataaagtgtaatggctgcaacaactgcgattacaattagtggtgtaaagataatttgtaagtagcctggtaaccaattcttaacccattttgttaatctagcaaccaaccaggctgctaaaatcattgggaaaattgaatacgtgtagttcaccattgggaagtttaacgaaccaatctcaaggagtgatttaccgtttaaagcgactaatgatgggtggactaaaacgcccccgataaccgctgttaagaccggatcgccttttaatttcttagcagctgtaaacccaactagcattggtaagaagtaaaagacggaatcgcccatcgcacttaaaataatgtagaattcactcttttgactcactaacgcgcctaattgcggcatcgttaacattgctaaaacaccttttaaaatcccgccggcagccaagattccgacgatgggactcattgcaccagtgatgacaccgattaattgactaaaagcttctttcacgtgcccccatggtgttaggttctgttttcttttagtttttgcgaccacttgggctgtttcatcttcatcggcaaagtctgcgccaatttcagcaatcacagcgtcataaacggccgttacctgattcccaatcacaacttgatattgaccagatgctttttgaacattaataacgccatccaaagctttgatcgtttctgtttgtgcctttgattcatcttttaaataaaaccgaagtcgtgtaatacagtgaattaaactatcgatattttctttgcccccgacaccggcaacaattgcttttgcgagttgtgaataatctttttgtgccatattaaatcctcccttgatttctttttataaaagcgctttctgtttatggactcatcatacaacatgtatagacaagttgtcaacgaacttcttaaaccgttttcaaattgcacttgcaacttcgccatttaatttatatgatggaattaatcaaacaattgaggtttagtctatgtcgaaaaaatatgaaataatctaccgcgaactcgtccataaaattacgaaccatgtttatccagccaactcattcttacccagcgaaaacgaactcgcaacagcgtatggtacctcacgcgaaacagtccgcaaagcactcgctagccttttagaaaatggcttcattcataagatcaaaggcaaaggctctttagtccttgattttgataaatacgcctttcccatttccggcttgaccagttaccgcgaattggatagtctctttgaaatgcacacgcaaacaacagtcctacaactccaaaaagcaaccgtcccacaagcgccttttcatttagaccccacagagattctacccgcgacctatattcaacggttacggaccgttgatggtgaaccaattgttatcgataacgactacgttctaaccagtgttgtcccagaaatctcacgggcagtcgctcaggattcactttatcactactttgaacaagaattgggtctaactattggttatgggaataaagaattcactgttatccctgcaaccgaagaacagtgtgccattttaaaactcgcccctaatagtgcggtcgttagtgttaaaggtatcactcatcttcaggataataccttaattcaatttaccgaatccattcaccgggctgataaatttaagtttattgaacacgcgcgccgccaatcaatttaaaacaatcataatcaaaaaggggggaccgattttaccatcggtccctcctttttgatgacgccactaactgtttagtgcaccaatgctatttaagagttgatttaattttagtcgttgctgtttttgaatcgttcgacattgatttaattgttgttccacttccgactcttcagtcaatcgcatcgcattgacaaaatcctttgcagcagtcacataatgcttaataaccatctgtaattgctcatgtaatgcgacaaattccgttggcggttgaatacgcgcaatttgatcaacaaattgatcgaggacagttaaattctgtctggaatagtgattaagtaattgtaaattttcatctaccaatcctttaccccgcataacatttttactagtttgcgcatattcactaaaaaccgtttcgaagacaataaaccgctctaaaaaccgattccattggatcacataagcttgtgccgatagctgaattgttggttgtaacattctaatcgcctccttgactatactttaaaatttattgttattataatcgtatatcacaaggaggcaccttgtcaaagatagtgcatttattcacatttatttaattaaacccgctttcgccatcgtgacccgatcagtattattaaccagatcaaaagtgtgcccaaactaatcagttgtccaagcagcaaccccggtgcccgataccgtaactgtacctgattggtgccacgttttaatggcactgctagcatgttggccattacctttttaggtttaatcatttgcccgttaaccttagcttgccaaccagcatcatacggaatgctgagatacagtagctgattagatgccattgttttaatatcgccagtgacatgtccgttatcttgccataaagcagtcgtcgttaatttttgctgatcaagttgtttgacagcttgattaaaccgttcttgattgagtgtcgcaacttggaaatgattaatattctgccgtttagggctaatcacagttaatcgtagcggttgccctttatgcgagtcctcaagcgggataattgcagcactcgtcactctaatcggcgttttcttcttacgtccgttaacaaataatttaattcgcgctaaattttgatgtggtaaatataaatacgtaggaccttgcgtatctcttggaatttctagcgtataccggtagctatgggccttaatttcttcatggaccatattaacccgatgatttgtataaaatgcttggtcagtatttaccattgcttgtaacaaccgatcctggttgtcgaatggccgatgctttttcaaagtaacatgcgctaattgccgattaaccgcaaaacccaatccaagcgtttgatgtcgttgaataaccgtttgctgattttttggttgtaaatcatagcgattggcaaataacagatccgtaatcgctgtatgtccgaccccattaattcgccggacgttcttactgtaaaaaccaaggtccaccagcatactgcgcatttgttcgtccaaagttgatgagtaattatttaacgtatattggccaaataacaaggcatcgttgtagccataataaggttcgcgatacgccgattttaataagatcgactggttattgacccgataaaaatcattatctttttcactgagttgttcatacagtgcagcttggcgttgatattgttgcgcatattgtttttgataacccaatggtattttatgcgtcattaattgaaaattagtgactaactcgccaaatgataccaaaacaacgcctgttatcagtattttttgatagtgacggtttgtttgaccccaataataaaataataacccgagaaatattgtgtagccacttaataatatccatgattgtgctgtaacttgcggataactctgattaccgtgtaatctcaattgaccaatcaccaataaaccactcactaaggcaatggcccaccctttggcctttttattttgcctctgtactaggcttgcttcgtaggcaattttaattaagacaaatgagaataagtaagcattccggtagggaaacccttctggctgctgaaacatatgccaaatagtattaaacgttgttacccaaaaactaagggctaaactaatcactaaaaagccattagcgtacttcgcctgttttcgaatttgtggcaacataaaatataaaaccgcaaaaaataatgccaatgtgcccacaaaaagtgttggttcgtgcgttaatcgttgtgtatagcgactaccaccgacctgaaattgcgtaaacacttcccagccaaattgtggtgtcgggtaaaaactggtcatggcaattgtcttttttccagtctttaacatgcctaacaacgctgggaggaggataatggcgcttaagccaccaacaatcagtgatgaccaaataaactgccagataactcgtgcttgttgctgtaataaatgcccccacttttgctgtggttgccgttgcttaattacaaggctaatcatatataaggcggcaaataagcatgtcatgtaacccaaataataattggttagaatcgaaatcgtcaacgtcacgatgtaaaatgtcggctttttaactgaaaataagcgttcgaggccgatgacaatcagtggcactaagattaatgcatctaaccacatcaaattataaaaattcatggctacaaagccacataaactataagccgttgaaaaaatcaatgcggcataatgataagtcgttgtccgtgttctcagaaaataactcattgtcacgcccatcgtacaaattttaagcgcaattacgtaactcaccataactggtaactgactattcgatcctaaaagtaacaatagattaaacgggctaatcagataataggccgctagtggcactaaattgccacctagcgataatgaaaacgagtaggcactgaagttaagatgagcgacttgccgcttgaattcagccaaaaatggcatgtactgtgtccctaaatcactaaacaataaattgtgattaccaaaaggcactaaccccatgatggcaaagccgatcaagaccaatactaacggcaatccgaaactgagtccgtaatagctgatcacctgtttatgttttgtttgcatcaaatttcaaccctctcttgtttgaagcacaaactaagcatagcatgctgctgagctaaaacaccaccaaacaactacgctactttgatagcacagttattaaacaaaaaagcagactactacctgtcattaaggtatcagtctgctttttaattaatattaagattatttcatcattccaagtgtcacgccaccgacaatgactagtaaacagccaagtgtgacatacaccatttcttttttcgttttacgttcacccaagaggtagatactaccaattgttgaaatgataatcccacattgtgaaagtgaataactgatggcaagaccgatatctgacattgaaatcaacatgaacaagtttcctaagccccataatagacctgttataatgttcaaacctgttttcttatcaaagactgctttaccaataccaacgccagcaaagatagcagcgccgataaacatcccaatcgcttgtggtaagacgattgttgttgcactaattcctgaccagttaacaatgattgtgtaaccaccataaccgattgttgaaagaatcaaggcccggaagccacgtgcaaattgtgtatcttctttagcggctaagctactcttaggatctttcattgatgttaatgttgcaccagcgattaagatcactaatgctgtaatcccgaagatataatcatgggttgttttccattcgtggaataacaaagcgcccgctaaagtgtttacaatcaattgcatccctgttgataatgggacggtttttgaaacacccattgcttgcattgattggaattgttgcccttgaccaatactccagaataatccggaaatgacaccgattaccatgatgaataaatcgattttaggttgaataaccaaaaaggtaccgattccaaaaaccaacgcaccaatcgtcatcccaaaagtttgttgataagcgttaccacctaatttaccacttaccaatccgatactaccccaggcaagtgctgggattaatgcaattaaaatagccatttttaaattcctcttcttctctaaagtacaagaatccattatacagacaaacgtaatcgatttctagagggaaaacggcaccattaagcgccttccaaaatggtctgtttatgaaaaaatgattacaccaaccatgttaacggttaccgtttttttgcgtataggttgaattttttttacttttttttagtaaacccgctaatcttttttagtaaacccattaacctattgttttgacgtaattaaaaaggtatcaaagaccaatcattcgtctttgacacccacaatttaatgttttaaaattcggtagcccttgtacaaagtcaccccgataatcgcgccaagtgtattgaagattaaatcatcaatatcggccattcctgttcctaaaataaactgggcggtttcaatcccaaatgaaaatagtgcgccttcaataatcgttaatagccaggtcccttttcgatctgttaatgaaccacgcaaccacccaaacggcacaaaccacagaatattaccatagaagttataccagtaatctatttgtgccggcgcattccgtaacttaaacgtctcgacaaacggcgttaagttaatttgggttagagagcggttgacatataggtgcatctgccaaggataataaatatggcgtaaaaccgttaacgataatagtagacatagatagaagacaaatataaaaagtttcaattcatacttaaattgaatccgacgttttttaaggcctaaatacaataaacgcagtccgataaaaataaaacaatacaaaattgtcttatccaaactctctaccgttaatttaattaagggcagatgattatattttgtcccccaaggaaggatgatgttgttataaagaccacctagaaataacaaatgataaccccacttatctgattgatttaagctattacgtcatacgtctattatatacactttgacgactaaatgacatatgccaccccgctaactaaagtgaatcttaaacttctaatcaagatacacctagcgttggaggagagatttaacgagctatgctataatggtgtgattagttaccaatacaacgtgtcataaggagccatttaatgaaagttttattgtattttgaaagtcaaaaactactcgctaaatcaggtatcggccgcgcactagatcatcaaaagcgtgcgctaactgccatgggcatcgactacacactcgatcctaacgatactgattatgatatcttacatattaacacatacggtttaaatagccggcgaatgattaaaaaggcgcgcaaggctggtaaaaaggtgatttaccacgcacactcaaccgaagaggatttccgtaattcctttgtcggttccaatcaacttgccccttttgttaaacatcgcttggttagtctctattcaaaggctgaccatctcatcacacctaccctctattcaaaggcgcttttacaagggtatggcattcaagtaccgattgcaccgatttcaaacgggatcgatcttgctaagtatcaagcaacgccggataaagaacaagcctttagagcttatttcaacttgaagcccgatcaaaaggtaattatttgtgtcggtttattcttccaacgtaaaggcttgctagattttgttgaaattgctaagcaattacccgaatataccttcatttggtttggtgatgtgccgatgtacagtattccacgcaacattcgcctgattgttaaaaaggaccatcctgcaaatgtgcgcttccccggttatatcaaaggtgacattatcgaaggcgcttatgctaacgctgatttattctttttcccttcttacgaagaaacagaagggatcgttgtgctagaagcccttgccagtcaccaaaaagtcttggtgcgcgatattccagtctaccacggctggctcaaagatcaacaaaattgctacatgggtaccgataatacggaatttaagcgattgattcaagacatcgttgaacaacgcgtccccgacttaactgaagcgggttatcaaactgctgaatcgaaacagattaccgcaattggccatgaattagcggccgtctaccaacatgtcttaacccctgatgaatcaaatccaacctacacgcaaatcatgcaacacactttaaaactttaagtttccgtttaaatcatgtcatgcactttgcgctgtcttcatttgggcggtaaaatgagtcaatgacgcgctttagattgattttgaaaggatgtcacatttcttgaaactcacaaaaataaaacaatttatggcctctaagcttggctttttaagcctattagtctttttattttgggttaaaaccctctttggttatttcaccgatttcaacctcgcagctagcgatccgcttcaaatggccattttaatctttaatccactcgcaactaccttgcttgtcttggggattttattgtacattaagcaaccgattatcagttattggaccgggctggtgatttacacggccaacacggcccttttgtactttaatgtcatctattaccggcaattcaccgattacatgacaattaacacgatcctcggttattcaaaagtttccgcgggcctcagtaaaagttcgctggccctaatgaactggcatgatgcactctactggctcgacattatcatcttggccgttttaatcctattaaaggtcattaaaattgatcaccgccaattccctaaaaggtgggcatttagtattacgtccctagccgttttgttattcggtgttaatcttggtctgagtgaaatcagccggccacaaattctctcacggactttcgatcgaaactatattgttaaatacctcggtattgatacttttaccgtctacgatgccgttaaaaccacccagaataatcaagtccgggcccaagccgaaagttacgacttagattccgtcttagatttcaccaagcagcactacgccgcgcccaatgccgattatttcggcgctgctaaaggtaaaaacgtgatcgtcattcatcttgaaagtttccaacaattcttaattgatttcaagtttgaaggtcaagaagtcacgccatttttaaacagtctctatcacaaccaaaatacgcttgccttttctaacttctttaatcaagttgggcaaggtaaaaccagtgatgcagaaaacatgcttgaaactggcgtgtatggcttaccacagggttccgtctttacaacgcttggttccgacaacaccttccaagcagccccttcaattcttaaacaaaatggcgattataccagcgccgtttcccacgggaatgttgggacgttctggaaccggaataacgtttataaaaactttggttacaactatttctttgattctagctattttaatacaagtcctgataacgtcttacaatacggtctcaaagataaactcctctttggccaatcgattaaatatttagaacaactacaacaaccgttctattccaaatttattaccgttactaaccatttcccattcccacttcctaagacagatggtgatttcccacgggcaacaaccgaaaattccgctgttaataactacttcgcaaccgctcattatctcgatcagtcactcgctgaatttttcaattatttgaagagttctggtctctatgataaatcgatgattgtgttgtatggggatcattacggcctctcaaattccgataataaagctttatctggcgttttaggccgtgattatgacacttggaccgataacgataatgcccaattacaacgggttccttacatgattcacatgcctggtttaaaaggtggtattcaaacccaatatggtggcgaaattgatgccttaccaaccatgttgcatctattagggatcaatagccaaaattacgttcaatttgggacagacttactttccaagcaacacgatcaagtcgtcgccttccgaaatcataacttcgtgacgccagaatataccgtcctcgatggcaccatctatcaaaatcaagatggtacagaagtcacccaaccaacagctaaattgcaaaagcaagtcgcaaaatggcaaaagcaggtcaatcatgaacttagcctttctgactcagttaacgagaaaaacctcttacgcttttacacaccaactggtttcaaaccggttgatcctgccgattataattatcaaaccggctatcaacaactcgttgatattgaaaataaactaggcactaaatcaacaagtgtcctttcccaaaacaaaggcaaatcaacagtcccattatttaaaacagatgcccctgagttagcagatgatcaatctagtttaactgaagtccctaaaagcaaagcactaaaagatagtgcagctacctcgtcaagtagtagctcggaatccggtcaatcaacatcagaatagtcccaaataaaaagtgccattccgaatttggaatgacacttttttgtatttaacgcgttaatacttgtttcttaaagctctcaaaaacagattcttgtaccgttgtaaagataataattagttcattatcggccgcaatcttgcggacatcgtttaataactgacgcgcatctcgaggtgctagttgatctaaataacgcgctaagacgaagacctgttgccgatttgctaaaccacgaataaattgaatccaaaactgatcgattggtttcaacgcgcttccttgtgtcgtccgcacttttttgacatattgatcagtcaagatgctaatgactgactgatcagcatccttaggtaacaatagattatcccaccccgataagaacggtaggatctttggttgcgcataatcaatcgtaaagggctgattagggaattgtaatgctgtcttcaacaactctggttgactgaaataaatctgcccgacttctaatggttgtttgttcaacataccgactcacctcttaaatattttttcttaaaacgactgacttgtaacccaccaatcattaaaatcggtgcggctaagctaatgattgcttgccataattgcccaaaaatttgattggttaatgtttgtttgacactattgtgcagtgtcggattcaaaagagaatgactactaaaatctgtcaaatgatttttaaagagtgggttgagcgttttaggtgctttttgcattgcttgcagtggtcgatgccaataatggttgatcgcttctaatcctcgccagaacggctgattagcgactaacaacaaaaggctgatcgttacgacagcaaaaaatagtaagcaaagcgccgttaagccgtaatacaacgtcactctcgttcgtgtccaattggcactaaagaaggtctcgatatcacgcgtcaaaattttaaacgccaaccaactaatgattactgtggcgatgattccaataataattagtaatagatatgcggtttgataccgctctaagactgtctggttagaatggagtaatgtctttaacggatgatccgctgcaaacttttcttcagctgtaaaattagctaactgactcttgagttgggttaatttatgtcgttctaaccgaatcaagcccaaaataattgtcgccaggcctaaaaataaacagtccaataaataaatcgctagcgactgccgccaataataatgaatattggccggaatcgattttaagaaaaacattaactcacccccttatagaaacagtgtaaagctaaagtgtgaaaaatatatgaactatctggttaaaaataaaaaagccagcataaaataattttatactgactgtcataacgatttaaatcacttttttagtttgtagttgaacagctaccccataaaaaagcgctgtgatcaacatggcgataaaggttgcccctgtataggcgtgcacgattgcgaattgatttaagattaaataactgataacgccaatcacccaactgaataatgccgttagatgatagcccttcgtataccagtatggcccagcaatcgtattaagcgcgtctacttgatagtgtcggcgtctaatccagaagtaatcgactaagaaaatcgcaatctctggtcctaagaacatcccaatactgtctaagaaggtttcaaaggtggtcaaaaatgacgcgacataaactggaataaaggtgacgaccgttgctaacaaggtgacacaccagagtgctggcgttaacttgagctttggaaaaatgttagtgagcgctgaaccagcagccattaaattaacagcattcgcggttgtactggtaattacaatcaccaacaaggctaaaacgccgagtcctaatttagcggcaatcgtacttggatcagcgttattaggatcaaaatgattcaacgtaatcgcggtcgcaattgtcgccgtcaaaccgatgaaagcaaaccagaataagccgatattagcccctaggaatgaataaacagttgcggccttcttacgcttggcaaaacgactaaagtcagcagctgctgtgacccacgctaaattaaaggcggctaaaatatcgattgctcgaccggcttcaagacgaaacttggcagctggacgccaagccaccagatccttgaacggtaccattttgaaaacaatgattgattcccatgtcactaagataatcacgagtacaatcccaatccgttcgatccaacgcactgatttttcacctaacgaaatactgataagatgcaagatggacatgatgatgatcccaacaaccaagctcaaacgattcgtagcggcatcattgcccgaccaacccataatttctttcaaaataaagctcacagaagtcgccgcaatataagtattaacggctgcccaaccgatgaattgcacgacgttaatgagtgacggtaagactgaacctttaacgccaaacgaagcacgcgttaagcccattgcacccacaccagtttgatagcccatataagaagcaagtgctaataagacataggataaacagccgatggcaatcaacagtgtagaaccttgaataagaccagttgcggcaataataccgccgatgtaccacgtcccattattagcgttggcacctatccaggtcgcaaataaatcccaatcacccatcgttctttcagacttagcaactgagtgaatcgtatgttgttttgccattttctctcctccaacttcgactatcacaaacaaaaaaggcccactccaaaacagagcgaggccattaaatcccgatagtcgctcctttgtcagcctctctggactgcacttaaaaggaattatatttataagcattgtattaaacctacttgccaaagtcaacccagtattgttatactcactattaaaaaatagcgaggatggattcagatgcttattcaaaacgttcatatcgagaaccagacagctttaaaatcaattagaattgaaaacggtcttataacagcaattgaatcacatcttgagccccaacaaaatgaaaaaataattgacggccaacaacaattagcgctcccaccgtttgttgacccccacgttcatctcgattcaacactaactgccggacaaccagaatggaatgaatctggcacactttttgatggtattcgaatctggtccgagcgtaagaaaacactgacacaccaagatgttaaagaccgagccctcaaagcacttaaaatgcaggctagtcatggggtccagtttgttcgctcacacgttgacgtcactgatcctgaactagtcgcccttaaagcactgattgaggtccgcgaagaagtgaaagactggatgacattgcaacttgttgccttcccacaagaagggattctctcctttccaaacggtaaggcgctaatgactaaggccgctcaactaggggtggacgccattggagcaatcccccacttcgagttcaatcgggaatacgctgtcgaatctttgaaatttgcctttgaattagcgcaagaatatgatttattattcgatgcccatactgatgaaatcgatgatcctaattcacggagcctcgaaacagtcgctacactcgccttagaaactggcatgaaagataaggtaacagcctcgcatacaacagcaatgggctgttacaatgatgcttacatgtataagctaatgcgcttattaaaaatggccgatcttaattttatcgctaaccccttggtcaacttattcttgggggggcgttttgatacctatcccaaacgccgcggtctcacccgggtcaaggaattaacagctaacggattgaatgttgcgtttggtgaagatgacattcaagacccttggtaccctatgggcgatggtaacatgttagacgtcctccatgctggtttacacgccactcaaatgatgggttatacagaaatcatgaatgcttaccgcttcattacccacaatggcgctcgggcaatgcacgtgactgaccaatacggccttgaagttgggaaacccgcccacttaatcttaatggctagtgataatttctataacgcaattaatcaacgggccgctgttacgctatcaatccacgctggtcgtattattagcgaaacacaaccggctaccactcagttatttatttaaaagctaaaaaaacgcaaccttgtaggctgcgttttttgtttgcgtagttattaattagcatcagttgtgacggtttcgtctgggaaagttaatgtaaaggttgtcccttgatctggttcactttgaacctcgatggtcccatgatgtaattggaccagttgatgaacaattgctaagcccaaaccagattcaccgtattttgtgttcttccgggaagggtcagccttatagtatcgttcccaaatattcttaacttgctcaggggtcatcccaatcccagtatcactaaccgtcagaatggtttcgtggaacccagcttctgcagtaaccgtaatctgtccgttattggtaaattggatggcattttgcatgatattaaacatgacctgaacaaagcggtcatagtcggcatagatagccacttcttcttgtgcttcaagcacaatggtatcaccggcatccgccgcttttttctgaagttgttcttgaatattttgcaacgcttctaccgcattaaatgtttgttgattcaatttaatttggtttgttcgaatcttttcataatccaagttctcattaaccaagcgaattaagcgattcgtttcgttttgcattaatgaaatactcttttctcgcatttcttctgggatggcatcgtaggctaagccttccaatagccctttcaccgtcgttaatggcgtccgcatttcgtgtgcagcatcggccataaattgacgacggcgatcttcttgccgcttaatttcggcctcagattcattaagcgagtggaccatttcgttaaagtcggtcgccaaatcatccaattcatccttaccggggttatcaatatggacatcaaaatccccttcggcaaccagatgcgttgcatttcgtaagcggctaatccgataaatctggtagcgcgctagaacataactgagtaaaatcccaccaatcgtcgaaagtaagaaagcaatcaataaattcttgcgcatcgtcactaagcccgacttaacgtttttaatagaggaacccaccccaataacataaatcaacttatcattatagaaaaccggtttaaaaacaaccagttgatcttgatcattattaaattgccgggagtccttgctcatactgagtcgttggacctgccccttcttcaggtatttccagtactttttcttaacggagacgttcgagttaggcgctggatagaccatttcattttgcgcattaaagaaattaaaactaacccgttgttgcgacaggatggcttggctatcgtcaataaactgcttggatagtgttgcctgtgagccctgtttaaatgcttcacgttcaataactgatgcgtaaccttccaactgatcccacgtattattataagccgtcttcgttgaatactgcgtaaacgcaattccaacgatcacgatggtcgtcataataaccccaaaaaaggctagcatccactgatagatcagtttcattagtgtttattgaccgctgaatcatcaaatttgtagccgacaccccagaccgtctggatcacttggggaccaaccttttcgatcttttgacggagttttttaatatgggcatcgactgttcgttcatcaccaaaatattggtaatcccaaacaagttctaataactgttcgcgtgagaaaacttggcgtggattcttcgctaaagttttcaataaatcaaattctttgggcgtaagatctaaaatcggttcgtccattaaataggcctcgcgcgtcttagagctcatcttgaagtgatctgtttgcacatcataatcggagttatctacttcttcaacttgcgcggcttccgcgccaacttgttcatcaactaactcagcacggcgatgaagcgccttaatccgggcgatcaatgtaattgggctaaaaggtttcgtcacataatcatccgcacccaattcgagccccaagacttgatcactctctgaatcgcgagccgttaacataataatcggcaccactttagattgctcccgaattttttgggcgacctgcatcccatccattcctggtaaattcaaatctaacgtaataatatcccaactatcaggatcaacactaaattgttcaaccgcttcattaccatcatacgcaaagtgggcatcccatgcttctttttgaaagaacatgcccatcatttcagagacagacttattatcttcaaccattaatattttcattagaattccttctcttttgtgtgattatattcttattatacagtatcttaaccaatggcggatgaattaaatatgaagaagctatgaaatttaccacgttgaattgacgaatcttgacacgcttgttaaaattaatttataatttaagtgatttatacgcaagtcaaaaattaatttctaacgctcaactagtcttttataaaattaaatctcctgtaagctagggcttaaccaattggttaggccctttttttatggccaatcggattagaggaggtggtcaacttgatcgaacacgaagcactttttttcaaaaacctgaagattcttcaagatttgaagttcatgatttatgaacgaacgtcacctgcaatcgattttcattgctttggtattatctatctcgaagttaatcaacaacagattgacctcgcagcggaatatcaggctttaaaaagcgatcattcattgggtgaaattgcccagacaatcatcaatcactatcagttatagcagttttactcgggggagtattaatcaaacacatgaacaatttagccatcttgtaaaccggaaggacgtttatttgcatgcatgctgaaaccatgctagcatggagtttattatgatattaggaggcacttattttgacctataaaggacttgtattttttgatcttgacgggacactttacaatgaacactctcgcgtggacccagcagtcgccatcgctgttaaacaactacgcgccaaccattacctcccaatcatttctaccggccgttcaccacttgaaattcaagaggcattagcaattaccgggattgactcattcatcgcattaaacggtagttacattcaatttgaaggccaaccggtttaccaaggcactattccaactaagacgattgaacaagtggttacaatcgctcaagaagctggcgaagcagttgccttttatgatgatcaagccattcgaattaccagtgttacacaagcagctaaagatgcttatgctgaagtcaacgcaccagtaccaagtgttgatccagaatattacttaaatcatccaatttatatgctgttaattttgacgaacgacaatgatgcggcttatgcaacagacgatttaacattctaccggaacacaccttattcaatcgatactgttgaaaagaacggttctaaacaaactggtattaagcgactacttgcttctcaaggattagaagacatgccaacttatgcttttggtgatggtcgcaacgatatcccgatgcttagttacgtcgattatccaacagccatgggcaacggcattccagaagctaaggcccaagctaaatacatcacatcagccaacgtagaaggtggcattattgaaggcttaagacactggaaattaatctaagctagtgctatttaaacaccattccgctcgcacggcatggtgtttttttattgcttatccctattgactgtttgctccttcacagcttacaataataactatttactactaaatgattaatcaaaggagtcctattatgtccaaacattctttatttgctaaaaagaaaatcgatgcaagtcaatttaaaaatggcttacttgaacgaaacttaacagcggccggcttaaccgctatgggggttggcgccgttgtgggggccggtattttcatcacacccggaattattgcggctaaatatgccggtccaggggcaatgttatcttacttattagcggccgttgtttgtgcgctagcagccctttgttattctgaatttgcttctaccattccactagctggtagtgcctatacttacgtctacaccgtctttggcgaattagtcgcttggattttaggctgggcactggtttcagaatatctatttgcggttgcttcagttgcggttagttggtcagcttattttcaaaatttaatggccggctttgagcttcatttaccaactgcgctttcggcagcgtgggaacctggtaaaccagccggtgttaatttaattgccggaattgttgttttaattgtcggtttcttactctcaaatggtatgcgcgaatctacccggattaataccattatggtcggcgttaaaattgccgtcatcgtcattttccttggcgttgccattttctacgttaaaccagcaaacttccaaccattcctcccttatggtgcctcaggtgtcttatctggtgcagccctggccttttacgcttatattgggtttgacgctgtttcaacggcctctgaagaagttattaacccccaacgtgatatgccaatcgggattatcgcctcattgttaattgcttcattactatatgccgctgtcgcaacagtattagtaggggttgttcactatacaaaattaaacgttggtgatcctgtggctttcgcattacaattgatgcaccaaaactgggtggccggcattatctcattaggtgccgtcgctgggatgacaaccgttttactcgtgatgacttacggtggaacacgtttaatcttcgcaatgagtcgtgatggtttattaccagccgtctttgccaagattaatcctaaaacacatgtaccagttgccaatacttggatttttgcagtcgttaccagtatcgtggctgccctcgtaccgcttgataaaattgccgaattggttaatatcggcaccctctttgcctttgcaactgtctcattaggtgtgattttcttaagaagaattccaaactacaatgagttgcctcaaggcttcaaagtaccgctctatcctatcgtgccaatcctctcatgcatcctctgcgtcctcttaatgacgcaactgcaaatgacaacttggattgtctttgtcatctggctcgttatcggattggtgatttactttagttatagctatcaccatagtcaacaaagaatgtaaggtattaaaaaaagcgtaacaactcaataatcaattgagtgttacgctttttgtgtggccatactatattttaaacgctctaagaatatccctaaactcaataaatcagcggttccacctgggctgaggtgcgcttcaattaactgagcatcaaattgccgtaattttcttctaacaagtaccatatcatctgtttcttgtaaaatttcagctgctactttttgaaccatttgccaaccatcaatgccacctcgatgaacaagattcatatcctggacctcagtcatcagcgttaacatcaatagtaagtggcgatcatcttctggcagcattctatatttttgtaaagttggtaaagcgatatattcaagtgatggataacccgcttctgcttcgccccgaattcctgtaaagccgtattctacataaagttgctcaccgtaactaagctgtgttttatctgtcatttgactaaaatcccgactcacaagtcccttggtcatattgcgaataatctcgaaaactggtttaaagttttgctcaactaatttagatagtgtcaaagtctgtccagctcgtcctattgcgcctaaaataaaagcataggaaaagttagcacctttatgcgtattgatttggctcgttgccagtaacatctgcttttcggcgtcttgaccaatttgtcttaatgttaagaaaagttgctgatcagaggtgctttggtaaccagcttcaatatacgccaataaatatgcttttagagcagcaatactctttaaaaaaagcggataatccatatcatcatgggcgccatttgattctggatcgactaatcctggcttaggcgctaattgcacttctgcaattagtgattggtatgcaagtatcgcaatcgcttttaaatcgctattcaagatgacgatgcctcatttccttaacaataaaatctagtgaatgattcaaatgctcatgggtgattagattaatttggttaatatcctgattcaacataccacgataaattaaccaatgttctgctaatgccaaatcacatctatcagtacttctaatacagatatctcgaaaataaactaggtattcctgtaattcaacaacaattgattttaaccgatacatctgactcttatcataaataaactgattgaattcagaaaatttctgtaaaacagcggttacgtcgcccgcttcattcaaacgcctagtctctaataacaattggtttaattgttcaaattcagccgttgtcattaaccgcatcgcctggcgcgttgccaaagcatcaagttctttgcgaattgcataaatttcataggcatccttcacagaaatccccttaacaataacacctatgcctggttttctaatcactaaatcttcatcggctaatcgttttagcgcgtaccgaattggtgtccgactaatattcatcatctctgaaaaatacttttcattaattctaacacctgcaggaatatcccctagaataaccgtttttcgaagagcctcataaattaattctttaatgggacgattttgtgagaggtcaagattcttagcgactgcattaacgattttatccatgccaatacacccttcttgtttttagcctcattatatactaaattgcttagcacttgttaactaccagaacaaaacgtatatttaaaattccgtctcaaattgaatatctattttttgaactggtacatcatagaaacgatcttcacgacgacctaagaaatcacgcgcctgttcaggaaatagtgcatacatcaaaacatcttcaatattatgtgcgtattgttgaatctctttttcaaattcaggtaattgcggtgctaataaatcagctggccgttgtgtaataggctgttggtcgccaataatcttagtaaccatttccggtttaatagctactggcggatgcccatataatcccttaacatagtccttgatttcgttaggtaccacttgatagcgttgaccagaaactatattcattaatgcttgcgtcccaaccatttgtgacaacggcgttaccaatggtggatagcctaaatcggcgcgtactttaggaatctcttccagtacttcttggtacgcatctgccatattttgggcctgtaattgtgcaagcaaattagaaagcatcccgccaggcacttggtaaataagcgccttaggttgaatatctttcaccttaggattaaggattccttcttctcgaaaacgatctcggataggtgcaaagtaatccgcaatttctgataatttagtttgatctaaatccacttcataacctaaattttgcaaactaattagcattgattcagtcgctggttgacttgtcccgccagcaaatggtgagattgctgtatcaataatatcagcaccggcctcaactgctttaagataggtcatttctgcaataccacttgttgcgtgagtatgcacttctaaaggtaaatcaatcgctgcctttattttagcaactaggtcaaaagctgtttgaggtgttaaaataccagccatatctttgatgcaaatcgaatcagcacccatgttagccattttaacggctaactcaacgtaataaggcacagtatgaaaagcactcgttgtataagcaattgtcatttgggcatgcccaccgtatttcttagttgcttttaaagctgtttctaaattacgagtatcatttaaagcatcaaataaacgaatgatatcaataccatttgccaacgaccgctcgataaaactttcaacaacgtcatcagcataatttttatatcctaatatattttggccccgtaataacatctgtagttttgtgtgtggtacttgtttacgaatctgtcgtaatctttcccaagggtcttcatttaaataacgaatacaagcatcaaaagttgcaccaccccaaacttcgagcgcatgataaccaacctgatccattgttttcaagattggtagcatatccgcaattggcattctagttgcaatcagactttgctgaccatctcgtaaaacagtttccgttatttctactttccgattcaccatctagcatcccaaccttcttcgattatttgttcaatttttagttggacttctaacagaccatgctgccgtgaacgactacaattttttgcatcctgaccacaaactagacaggttcgtcttggtgcccctaaagctacgcgactgacttgtactaattgttccgactcccaatacaagacatccaagtcccaaattgcccctaagggattgccttgctcaaagcaaaccatctcttgcttaatctgttttggtgcgatatttaaaacaaaataaaattctggacctgttattgcttcaagcttgattaactggtcaacaagtttatccttatattgtttttgaatagtttcacaaaattgttgaaccagtccttttaatttaggtccggtttttatcgggcccggaatccgcatcgtaccacatagtaaagtcgcttctggatattttttaagcaatcttgtttgattaacaacacgctgctcacgtgctgttaacatctgacctaaatcgatggctggacctgttagttgccggaattcagacatttttgaccacatcgatcaatgtaccgtcacggtattcaattaaggcaactagccgatccccatatttaataggtgccggttcacccgtaattgcataagctttttcttttaaggcctcaattgtcagttgtgggattttactatctttgaaagcagcaattaaatccgttcgcagtggattaatcgcaatcccaagttcggtaacgaccacatcgatactgctgccaggcgtaaccaccgttgtcacttggtcaacaatcgttggaattcttcctcgaacgattggcgcaatcaccatactcatcttgcaagctgtacttgtatctgaatggccacctgacgcgcctctcagtacaccatctgatccggtaatcacattcacattaaattgcgtatcaatttccaatgccgataaaattgcaatatccaattggttaattaccgaacctttgctcaaaggtgaggcatacatggcagcgtcaatttcgtaatgttcactatttttacctaacgaaatcgctgatggatgatcaaaatcttgaacatcaattactttctctactaagccatcttctaatagttctgccattgcattcgtaataccgcctaagacaaaacttgctttaatattttgatcaatcattgcctgttttaaaaagcgggtcactgctagtgctgccccacctgttccagtttgaaatgaaaaaccatctttgaaataagttgattctgtaatcattttagccgcatactcagcaattaatagttccttaggattcttcgtaaaacgagttgcacctttggcaatcccctctggatctccaatcgcatcaacttcaacaacataatctaccaatgtttgcggaatactgattggtgtattaggataaggcatcaaactatcagtgatgattaccacctgatctgcatattgtgcatcaaccatcgcataacctaatgagccacacgttgttttacccttcacgccattagcattaccatactcatcggcactaggtgcacctaaaaaggctacatcaatatgaatatccccccgttcgattgctctagcacggcccccgtgagaacgaataataacgggatcagctagaataccttctgaaattgccgcaccaactttatcacgcaatccgctagaggtaacgtgggtcacaacaccttgtttaatataatcaattaatggttcatgtacatttgcaattgaactcggtgcaattgcaagatccttaatgcccattttagcaatttcagctaataccatattcatgatatagtcgccttctctaaaatgatgatggaatgaaatcgtcataccatcttttaaaccagtttgaataatagcatcatgaatacttgctaatagcttactatctcttggtttaacaggatgtacttttttagtagcacgttgataatctttaatgttggttaattcgccagcataaacgccatattggcttgcgtattgatctggaatatcccgaccgacttgattaatcgtcattattttacctccatattagctgcttttgccattgccaaaacgcgatatgcccgttcaacaattggtttatcaaccatttttccgttaatcgcaattacaccagaaccctttgattctgcttcttcaattgcggctaatacttcttttgcattttgaatttcagcttgcgttggtgcatagattgcattaataattggaatttggcgtggattgataacagattttccgtcaaatcctaattgtttaatgagacttgcttcttgtcgtaagccgtcttcattatcaacatctgaataaacagtatcaatcgcggcaatccctgctgcacgtgctgcatgtaaaatataatttctagcaaaaaacaactcttgaccatctggataacgtcttgttttttgactagtaacatagtcttcggccccaagtgcaatcccaatcattcgatttgaagcgatagcaatttcacgtgcatttaataccccttcagctgattcaatcgcagccatcattttagttgtcccaactggtatttgatagtgactttcaactgattcaatcgcagcatctacagctctgatatcatcggctgtttcagttttaggtagtcgaataacattaataccgcctaaaatcatggcttcgatatcctgacgaccaccactagataattcattaattctaacaacagtttcaacactctgataatcaaatgtctttaaagctgagtagactaacaagcgtgctgagtctttttccttcattgaaacagcatcttctaaatcaaacataatcgaatctgcaccatataaaattgcatcccgtaacattgcagggttagcacctggtacaaacatcattgttcttcttaagcgatccatttgttaatctcctcccaatcgtaatcttctttacctaggccgcgataaacagcaacaatggttctggccttaatcgtacaatccaaagcacctttatcaactgcatctaccgtaacgtttgtaatctcaaattgctttaatacggattcaatcatcgttctaatctgttgcccaaactgtttttcaacattactttgtagtttaatttctaaacctgtcttattgggacttaaggtaatcataatatcacttgattccatcgtccccgctgttgcaatttgctttaattccattagccctaactccctttcaaaattgtataagtctgttgtggtactaatttttgaaccgtttcccaatcatcctgctcaatcgcggcccgaacgcgagttgcactaatcaccgtgccatcttgtgtgagccttgggatgatttttagtttaagtttattcccaaaaacggccatcatttgttcattataaatttgcgtcactggcgataaaggttcttcacccacccaacgcgtttgaattgataaaataggtgcaataatttctagaaataaagtggcatcaactttagcttgtaccttagcaatatcttgattcgctttttcctttaaaaaataagttggaaacgtcatattggaaacaatatagttatcggttggcaataccacgatcttaggattatcttgcgtcacttgacgaacgatctcaaggcgtgtcgcttctgaaaaagtcgagcgattctcagaaacgacaaacagatatagtacatcactagcggcagccgctgtttcaatcaaatattgatgtcccagagtcagtggattagcgttcattacaatagcgcctatccgccggccttctcttttggcagttagtaatttctgacgataggtgtcaatattaggaaaacctcgttccaaaacaacaacagtatccgtttttacaatgactttaaatcctaatgattcaaaatagacagctgttgctggttttgtataaacaaaactatgatgtttttgaagttcttccagataagtcaacagatcttgaaccactaatgctagtaaattctgggactgttggttattcttaattgcaacacatttgatgatattgtcataaactgagccggtggcgatcaattcttcaccttcaaacaaaccaaccgtataatcaacttgccaatccgccgttaaaccagattcatttaatagcacttgccatttttgcgcttcttcttgattaatcgttaaccaaatccgtttactcgttaccatttttaattaaccggaaagaacttgattaataatttagctgcgacgaaaaggataaaaagtactagaaaaacgccacccattccgaatatcattaattctaaagcagtttctagattagtccacattaagcttctcctcctagctgaaaaatgatagtaataacccaccggcaattactgaggcaatctgcccagaaacatttgcaccaactgcgtacattaatacaaagtttttaggatcttcttctgatgccattttctgaataactcgacttgacattggaaatgccgaaataccagcagcaccaatcattggattaattttttcttttctaaagatatttaataacttagcgaataacacgccacccactgaatccataatgaatgcgactaaaccaaacgcaataatcattaatgtttgaacattcaaaaatagaccagcttgcatcttaactgaaattgttaatcctaataaaatactgacaatattcactaattcattctgagctgtgttggataaccgatctagtacaccacattctcgcaatagattaccaaacattaggaaaccaactaatggtaatgaaattggtgcgataaacccagccaaaatggtgataatgattgggaataaaattttagtcatttttgaaatattttctgctttataggtcatccgaatctgacgttcttttttagtcgtcacagctttaattgccatcggctgaataatgggcactaacgccatataggaataggccgccactgtaattggtcctagtaacttcggcgctaattgattagaaacaaagatagctgttggcccatcggctgcaccaataataccgattgaagctgcttctttaatatcaaagccgaacaacacagcgacaacaatggtgaagaaaattccaaattgagccgccgcaccaaataataacataaatggattctgtagtaacggtccaaaatcaatcattgcaccaatcccgataaaaattaataacggaaataattcggtattaataccagcattgaataaaacatctaaaacgccttctgttttggaaccacccacaacttgtgttaaaaccccagtccctgggaagttaacgagtaacgttcctaatcccatcggtactaataaggtaggttcatattcttttttaatccctaaatacatcaataaacaaccaatcagcatcatcacaatttgaccgatcgtaatacttgtaatgccttgaactaaggccgccataataagcccccctatttaatcgtaattaatgcatcacctgcattaaccgattgatttcgttctacaaatatttgtgatacttggccagcacggtcagcaacgatttcattttccattttcattgcctctaaaactaataatggttgattttcaacaacttgatcgcctggtgctaccaatattttgataacagttccgggcattggtgctgccatcgcatcagcatcagctgctgcttgattcacaactggttgactctctgattttgcttcaggtgccggtgctgcaggttgttctacagcttgtgtgactggtgccaccggtgttggtgtgccaccaatttcttccatttcaactaaatattcttgaccatcaattgatattttgaattttcttaacattatgcttcctcactcactctctttttaattgaacgtacaacgtattgttgctgttcttgtgtcgccatcaaacaactggcaatcatgctaacccgttttgcctctggattaggcactaataatcgccgaacaataaattgactctgaggattttcgccactagcaatactggtcgcaattaatatcacctgtggatatgccttaggattaaccgagacgtatttaggtaccgttagccattcttcttttatagattcttctggctgtttaagcggttcagataccggttgtttttgctttttgaaccaaccaaacatctcatcatctctcctttcaattaagaatgtttaatgttgtggaatataaagtggcatatgacctgataaaataattgtaatcacaaagatgacaaacacccctaacgcatatttagcggcttctttttgccattgccccatatctaatcctgttaatcttaataatagatagataaacgcaaccaatgggctgagtagatggaatgcttgacccattaatgaagctaaagccatatccatattactgaaaccatatgcacgccccgcctgtgctagaaccggtaataccccaaaataaaaaccatcatttgagataaagaacgcacctggtgcagaaataacagcaatgactaagccccagaaaccggctaattggtgcggaataatctgagtaaagctttgtgccaatgcttcagccattccagttccttgaaataatcccatgaagaccccggctgcaaagacaaggataacaacttgaacggcgtccccaccattttcaccaattcgtttagattgatcctttaaagatggatagttaaccattaatgcaatacatgtgccaacaaggaatagtagtaatggtggcatttcaatcgctgagataaatgaccctgcaactaaccaaccaattaagacaattgtcaaaataccattaaaaacaaaattctgtgggcgacgcattttttgaacttctggatcagtgacagccgtcatttcttcaatttcagcgtctgttaattgcttaacacctaatcgtttacgttcttgacgtcccatatgtggtgcaacgtagaaaataacgtaggctaatgctaaaatcatccctggtgctagataggctaaaatactagcatcaacatttaaaacggccattgctctagccgttggtccgccccaaggcagtaaattcatgatcgtattttgtaaaataactaaaacacctaagttcattagtttcatatcaagttttttgtagattggaataaaagcagaacaacagattaaagtagttgttgtcccatccccatttagggaaacggttgccgcaacaacggctgttgcaattaaaactttcatcggatcacctttagcgaagtgaatcatcttcttagtaatcggatcaaacaatcccgcatctaacataattgaaaaatataaaattgcaaataataacataataccggtgttcgctgtagttttgataccttctaatacgaaatcacccaaagttccttttttagcaacacctgtcagcattgcaacaatagcaaagatcagtggaataataactagtgctgtgaaaggtgacatttttttcttcatgataatatacataaaaacaataatcatagcataagcaataatagttaatagcatgttctaaccttctttactttatattttgtctttcatttcggaatccctatcatcataatagcctgttataaaacacaataaaagtgcttacaatataaagaacacttaaaaaacaatcgttagaaatatcaaataaaagaggtattaataagtcctaacaacttattaatacctctttattattttatctttatcaccatgataagacccgctctacctcaccagctctgataatttgaagtcgctgtttctccgtttggatcactaactcaccattatttgtaatatcttgaacgtaccccgtcaaaattttctcttcattcaatcggacaacaatcttttttgatattaataaagacgattcgcgatattctgccataaatgttttttgacgataggttggtagtaatcgatcaaattctaatagaatttgactaatcagttgattacgagtaatcggacttgtattaggcaacaaaacgcctgctttttctaccaactggcttaattgaccgtcatctttaaagtcaatgccaatcccaatgacaatgccatgatgtggaattgactccgctaaaataccaaccaccttttgaccttcgtaatagatatcattaacccatttaatctgcgtttcaatctgacaaactgctcgaatagcacggacaaccgctactgcgctcaagggcgttagcaatgtcgcttcttcattcaatggtatgtcaggtaagagaagactcatatagattcctgtttgctgcggagaataaaatttacgctttaaacgaccataccctgctgattgttgattagcaatgatcacatctggcataacagatgcgttcaataaatattgtttagctaactgattagttgatgtcacaagattatgaatttcaagtctcttaggcttagctaaccctcgattaataagagcggcttctaattgatcagctaccatgcgcatacccttctttcagtctaccaatcgccaaatttcgtatcttgaagttgttgtaataatttctgatactcctgacttgtgcttagtcctgaagtaaaggtttcatcttgcaaattgttaaatttttcagcaagataataagccgttaaatagatcgtcagttttcgtttaacaattgcttctggatcaagttcatctgatacgcggtgtgaattaacaatcatttttgcaaattctttttgatctaattttaaattatcatctgatgattgagttgtcatatgatgacctccatttttatgatttacatttagaatagcacaaccaattcataaagaaattgaatgttggctttttattgttctttttacaaaaaaaggccaccaatcaacattttaatctgttgattggtggccttaaagttggctaacctaagtcagtccctttattttttatgttttttattcaaaatcttgtcgaacaagttgttgtcttgtgggttaactgagtcaccactagctactgcaaatgcttttaaggcatctcgttgtttactgtttaaggtctttggtgtcaccacgttgactgtcacgttttgatcaccgttacctgtgccgtgaagtttaggcgcacccttaccacgtagacggaaaacagtgttcgtttgtgtaccagcaggaatcttcaacttaactggaccatggaccgtgttaacttcgatttcgtcccctaaagcggcttggacgaatgaaattggtacttcaacaaaaatctgagcaccatcacgttcgaactcatcactaggtgcaacgcggaagacgataaataggtccccataagggccaccatttgaaccggcttcaccttgaccttgaagacgcatttgttgtccatcttcaacaccggcagggactttcaccttaacggtatgacgttcttcttcgcgacctgtcccatgacaagtatcacattttgacttaatttccttaccagtcccaccacagacatcacatgtttcgcgtgacatcatacggccaagtggtgtttgacgttccacttggatttggccagcaccgtgacatttatgacacgtttcagcacttgtgccaggcttagcacctgaaccgtgacaagtatgacattcggcttcacggctgtaagaaatctttgtttccttaccaaagacagcttcttcaaacttcaagtccattcgatattgtaaatcagaaccttgacgtgggccattaggttgttgacgagccccgccaccgaagaatgaactgaagatatcgtcgaatccgccgaaaccttctgcgccaccgccgaagccaccaaagccttgaccagcaccagcgccgccaccaaaaccgccattcatgcccgcatgaccatattgatcataggctgctcgcttttgaggatcgcttaatgcttcgtatgcttcagttacttctttaaattttgcttctgcatcaggtgctttattgatatctggatgatattttttagaaagtttacgataggcttttttaatctcatcgtcagaagcatcgcgtccgacacctaagacgtcgtaataatctcttttttcagccattgtgggcctccattcatttacttacgggttaaatctaccctaacaagaatagcataactgattgattaaaaaaagccaaagccctagaccatactaggttttggctttttttaacgttcttattctttgtcgtctttaacttcttcgaagtcgccgtcaacagtaccgtcatcagtcttagcatcagttgcgttaccttcagcaccaccagcagcttgttgtgcttcttgggcttgttgatataacttaactgtcaattcttgaacaatttcacttaacgcatcgcgttttgtcttcatgtcttcaaggttgttttcttgttgtgctttaactaattcttctttagcatcttttgctttttgtaattcttcgtcagaaaccttaccttcaagttctttcaaagtcttatctgtttggaagattaattgatcaacatcgttcttcaaatcaacttcttctttacgttttgtatctgcttcttcgttttcttgtgcttctttcatcatacgatcgatttcttcgtctgataaaccagagttactcttgatagtgattttttgttctttgtttgtgccaagatccttagcagaaacgttaacaataccgttcttatcaatatcaaacttaacttcgatttgtggcacaccacgaggtgcagcaggaatatctgttaattggaaacgacctaaagtcttgttgtcagcagccattggacgttcaccttgtaagacatggatgtctacggcaggttggttgtcagcagcagttgagaatgtttgggccttgcttgtaggaatggttgtattccggtcgattaacttcgtgaagacaccgcccattgtttcaatccctaatgataatggtgtcacatcaagtaaaacaacgtctttaacgtcacctgagataacgccaccttgaacagcagcaccaagtgcaacggcttcgtcagggttgattgagtgatcaggttctttgcctgtccagttcttaacagcttcttgaacagcagggatccgtgttgaaccaccgtttaagatgactttgtcgatttcgtttgcatctaagccagcatctttcaaagcattcataactggtgcttttgtacgatcaactaagtctgatgttaaacgatcgaattcagtccgtgataatgtcatttctaaatgtaaaggaccattttcgccagctgagataaatggcaagctgatttgtgtgcttgatacacctgataaatctttcttagctttttcagcagcatcctttagacgttgcatagccatcttgtcttttgataagtcgataccattgtctgatttgaagttttcaactaaccagttcatgattgcttcatcaaaatcgtccccacctaaacgtgtatcaccatttgttgataatacttggaagacaccatcgcctaattcaagaacagaaacgtcaaaagtaccaccaccaaggtcataaactaagactttttcgtctgtttctgtcttatccaaaccgtaagctaaagctgaagctgtgggttcgttgataatccgtttaacatctaaaccggcaatcttaccagcatcttttgtagcttgacgttgtgaatcgttgaagtaagcaggtactgtgataacagcttctgtgacttcttcaccaagataatcttcagcgaatttcttgatgtattgtaagatcattgctgaaacttcttgtggtgtatatgatttgtcgccaacagttactttgtaacctgcttcgccgatgtgacgtttgattgatgcgattgtatctgggttagtgattgcttgacgtttagcaacttcaccaacttggatttcaccatttttgaatgatacaacagatggtgttgtacgagcgccttctggatttgtaataattttgggttgtccgccttctaatacggcaacagctgagtttgttgttcctaaatcaataccgattactttactcattgaaaataccctctttttttaattttttaaattttattattgtgcaacgacaaccattgctggtcgtaaaacgcggtccttcaaataatagcccttttggaagacttgaaccacggtgtcagctttttgatcaccatcaaccgcaaccgtttgaacggcttggtgaatggtcggatcaaaggcttgaccttgcgcctcaatttctttaacaccatggtcttctaaagcatgtttcatatgatcatatgtcatttgaacaccctttttaagactttcatcagttgcttcagctgccaatgcgcgttctagattatctaaaacgggtaagacatctttggctaatgattggccatcatattttaacaagttagcttgttctttttgattgcgcatttggatgttcttaatttcagcttgtgaccgtaagaaactatcttccatagcgtcatatttcttttgaagttcagctaatttatcatctgcttcttcaacaggtgcttgtgcctcagttgtttcttcaatttcatcagcttccataactggttcaaatggtgtttcttttttaggcgtttcttctacagtttcttcagttggcttttcttggttttcagccttttcttgctttgtcaaacaaacacgctccttttaagattgactatcatcaaaatctgcataataatcaattagtttcttcgctaattcttcgcggaataaatcgagtaacccgatcatgcgcgaatatggcatgctagtgggacctaataaagcaatcaatccttggccgtgttcaccaacatcataattaacagtcattaaactgtaattcttcaataaatcattggtcatttcattgcccaaacgaacctgaacttggctattggcctcacccggtgataactctagcaacttggctagatcgtccgattgattaatgatgttgtagattgacttcaactgtgacacatccgtcaattctgagaagtttaataagttcgattggccccccacatataaacgttcctgtgaggcttgttttaagacatcatcgaagatgtttaaaaagccgcccggtgagcccatgtattgcattaataacgcaggcacctctattttcaacttctgactgacaacggtcaacggtaatccgattagatgatcattcacgactcgaatcgctttttcaagttcatcacctgaaatcgcgtttggaattgtgaaaacctgattatcaaccgttccggcacttgtcacgataatcgccattacctggtgattaccaagtggcacaagtcggaaacctgtcaaccgaatcgctgccatctccggtcctaacgtaatcgctgtatagctcgttaggtttgaaagaatattggcagattgtgaaacaatctcgtcaatcttatgataatggcgtccaaatgattgttgcacagtcgcaacatccattggatttaagacagcgggctgaatgagatgatctaaatagtaacgatagcccttcatagaaggaacacgtccagaagacgaatgcgtcttctctattaaaccgacattctcaagatcagccatatcatttcggattgtcgcggaactaacgtgcattggtagttcagacattagcttcttagaacccaccggctgaccactctcggtaaaaagacgaataatttctttcaaaatcattaattgtctttcggtcagcatgttatcacctctttttagcacttgattattacgagtgctaattacaagtattaatatagcaagaacgtcaaataaagtcaagaattgaactgtaattttcacggatttaatgaaaatgggaccaaagaccgataaaaggccacacccaaatgatgagtgtgaccttttcaaagattgctatcaataattctcgtgaaattgttgtaaatcagcgactgaatgactcgctaatattgattgggctgcttggactttttcaattggccagtggtaccaatcaattgcttgcagggtttcaatgtcagctggtgtaaaccgtgactttaaaacccgtgctggattaccaccgacgacagcgtacgctggcacatccttaaccaccaccgcaccggcagcgataatcgcaccctgcccaatatgaacgccaggcataattaacgcacgcatcccaagccacgcaccgtcttcaatgattgtatcacccttgggctcataagaggccgcaatttgttctgggaacggataggcgctaatccaatcactgtgatgattatgattaccgcccatcaaaataacaacgccactggcaatgcaaacgtaacggccaataattaggcggtccaattgccaaccaaattcagcctgtggattaaataaggcacgtgaggcatcatcgccccaatgatatcgaacacagccgtcctcaaaattctggtgatcataatacccccgaaaagtaagaataatcgccgacttcaattaatgggtttgtcaccaaatcctttaaatattttgtttctgaccaatgttgataagtattcttgtccatttcataaaacctcgcttctaagtttttgttatctgcttaacttagaagcgactgcttgtgaaacggcccgtaattgtaaaaggtgtctaaccaaaaatgatcaccatcccatttgctcgaaatataaccggtttgaacgcactcacttaatagctgtctaacaagaattcctggaagacttcgttgcctaggaactttcctgattcagttagtcttagccagtcgccttcttgttttaggtacccttttgcaatctgattggcgactgtttcgccgtagatattctgtagtgggtatctgaatttttcttcaaagtgcttgattgagacaccttgcattgtccgaagccctaagaagagttcttcttccatttgttcggtcaagggaagcacgtggcgttcgatcactggcactttatgtgcttgtagcggctctaagtattgttggattgggccaaaattgtggtagcggtccttgcccagatagccataagcaccagccccaaagccgaaatacttttcattccgccaataggttaagttatgtgcagactggtagcctggtttggcaaaattactaatttcgtattgttctaaaccagcttgttggaaactatcaatcgcattttggtacatgtgtgcttcaacatcttgcgatggtaagcgtaacttaccctgacgcatcaaattatagaaaatagtcttcttctctaaaattaatgaataagttgaataatgcggcaagtcaagatcgattgcctgtttcaaactatccataaaatctgcttcactttgttgcggtagtcggaaaatcaaatcaatactgatattttcaaaacccacttgacgcgcattagcaatggcccgataaacgtcagcactgcgatgaatccggccaatcttcttaagaatgtcatcattaaaagactgcacaccaatactcaagcgattgacgccattgtcttttagtacctgtaatttagcggtatcttgtaaatcattggggttggcttcaaacgtaaactcgccaccctcataaggtaagtactgatgaatgccatccaacaaacgttgtagttgggctggtgagagtgtcgttggtgtcccaccaccgacataaatcgtttcaattttctcgtctgggtattccgccattactaattgaaactcgcgaattaacatgtcaacatactcatcaaccggttggccttcaatgaagaccttgttgaagtcgcagtaataacaaatatgttcgcaaaacggaatatgaatatatgctcctgccattaatgttgggcctctaatttctcaaaataagtccgggtatcagcttcatcttggtggagttggtcaatcaacgcttctgccgaatcaaacttcacttcacctcttaaatactgataccactcaactttaacttgttccccataaatgtccgcactaaagtcgagtaagttaatctcaactgtcacgggattattggcgtggaacgttacgttccggccaattgacgccatcccccagtaccattggccgcgaaccaataagcggaccgcataaatcccaatgcccggtaaacgttccggtttttgactttcaatattagccgttggaaagccgagttcccgcccccgtgcttcaccatggacaacttccccagtcgtttggtaaacataacctaacaactcgttagcggctgctacttgaccttgatccaaatttttacgaatcaaagttgagccaatcttatgaccttgataatcgtgttcagccaccgtcacgatttcaaaacggtctttggcatacgtgctaagggtctgcatattagcgatgtcttttttaccataggtgtaatcaaacccagcgaccaccgttttcgcgtggagcgccactaagtattgatcgacgaaatcttggggtgccaacttggcaaagccatcgttaaaatggacaacatataaaatatcgacacctaaatcagccattaattcttgcttccgttcaactgtcgataaataacgaaaatcggcttgattgacatttcggtaaacaatcgcaggatgaatatcgaaggtcatcactgccaatggtcggttctgttgcaccgccaattctttagccgtcttaatcactgcttgatgggcccggtggacaccatcaaaaaagccgagtgctaaaacaatttcttcggctggtacttgttcttttgaatagggatgaattaattcaatcacacgcatttttttcacctagtttttttaatgagtcccttggttttgtaaatacattttatatggtcggtagagatgttgtttcgcgttagccacttgatacaaggccttgatgtgcccttcgtaagttaaggctaagatttcttctgtttgttctgggaacgttaagaagacaccatttaaaattttggcccattgatcatcatcaagcgcaatcttgacgttttcttcaaaaacatgatctaatggaatcaaaatatccgctaattggccgttatcagcagcttcagctagttgtgccaaggtaacacaactgccaatttgaatgccaccactcttaagacgcgttaaatcagacatgactgccggtaagcctaacttacggccgaaatcgacagctaaagtccgaatataagtcccttttgaacagcccgcaataaagcggaatgtttggcgacccgtttttgcatcgaattctggttcgccttgcaagtcaaattgcgtaattgtaattttgcgttgtgggcgttccacaggatcgccagcccgtgcgtaatcgtatagacggcgcccgttaacttttacggctgagaacatcggtggaatctggattgattcccctagaaaactggccagtgtttctttaattttttcagttgaaattggttcagttaattgttgttcttcaacgacttcaccatctaaatcttcagtggtcgttgataagcccaacgtaatttcaccggtataaactttaccagagtgcaccaattggtccactactttggttgcttggccaatacagattggcaaaacaccatctacattgggatcaagcgttccagaatgccccacttttttcatatgaagaatccgtcgtactttaaaaacgcaatcgttgctagtcatgccgcgttctttatataagggtataatgccgtccataagtaatctccttttaactattaactaaaccattatagcatagagtgctggctcgaacgggatttgctttcctatgcgccacaatttatcattaacgcacaaaacgccgggacaaccattaagttgtctcggcgcttattttatgaaggtaatttctttattttgaagccgactatcgatccgggcactttctaattcaatggcaaaaataatttctctttccttttctgccttagagagactctccatatagcccggtacctgtgcttgataagcagccgctacatcactaaaactatactgggtgcggtataccttgagccgattgctggtaatcctcaacccctcactcgtgggtagcgtataaattgcagctcggcctagatccagttcactcacttttggtgcttccgagtccgttccaaaataccagatattaggggcatcattgagcgtaacaaaactaatctgtcgactagatggctgtccctgttcgtccgccgtacttagcaggattgtattaaattgcttaacgtaattgcgaaacgcgtttaagttattctggtatgtctctgaactagctgtttgattatcaatataagcaatcgcatcgtcaattgtctctaacgccggattggcttctaaataataaagaatttggggaataatttgtgatatttctcgttgatgataataaaactgcaaccaccgattagaggccgataaagcatccgtataacgcttatccagctgtctatgatgtcgttgaacaatattttttaaagggcgatgtttaatcagtttttgaaagattgctaaactcagtagaaacattacgattgcaactaaaatattaattttaacaatccccatcattggctagccttcatatgccatcaggcaatcatataagattactaaaaaaatggtcaacacagccgcacaaacaatcactaagcggcgtttaaaaacccgccgtttatgggtcatcgcttcaattattttttgccgctctttcatagttcgttcgcgggcaatcatctcatctatgacagcttgatcttcattagaaatcatcgttttccccctcaaaggcatcaaagcgctgacgtaactcataagtcccaacatcggcaaaatcgggaataatgatattttggcgctgcttacgcatgcttgctgcaccatatttagcagtatacatctcttcggaccaggctagtcgcttctgtaaccgctgttcatcaaacgttttagcgataccctttctaatccgatactgttttactttattcattaaatagagactgataaagaaaactgaaaaaacgataatatagcgcaagaagatataattcgtattctgtaataattgtttaaaggcggcccgattaaccggaatgattgtttcacgggttagatagataccgactgttgccgcggtgggaatcagacacattacccagccaataccaatcaatactaattgacgcaaacgatgaccagtctttttagacgtaaaaaaccaatcgattgtaatctgatcttcacttaattgatgacgaatataatctggtttactcatctgaatcctccccttctcgttttccggttgcttctgtcgaacgtgtcggtgatttccaaaccccagcatctttgccccggataatttggcgaatcgttggcacaatctcgaccgctacggtatacgtattaaccatccaataaatcaaaatataccaaggcgcaaaagcgatatacttcaacgagcggcccccatcattaaaataggaggcttgcaccaattgaattaatccgaccaatatttcaatcgtgataaaaattgctgcaatagacaaactcgaaaggagccggtaccaatcctgattaattacgtaaccaatttgaaggacaataaaagtcgccatgctgatccaataaaataacgaccaaatgatactcaaaccataatcaatgataatcgggaccatcgaaaagtgcttaattgggtgccgtaaaataccaaacgatttcgtcaagagcacgtagatcccgccagaggtccatcttcgccgctgcttaacgagttccggtagtgtttctggcacatccataaaaaaccgaatgtgcggtgcaaaataagcctgccagcctgcggtctgcatatcccatgaaattgcaatatcttcagttggttgttctgcttgccaaccaccaacatcaatcactgctgccttgcggtacatcgtattagccccagaaaaggcaaataatccaccataagaaagctgcgagcgtttaattaagccaatgattgaattaagttcattttgctgggcttctgccactagggttgtcttattaatcgacaacatattgccggtcacagcacctaattgactgccaccttcccgttcgaaataatacatatacttccataaggcatcaacttctggtttggaatcagcatcattggacaaaataaattcgcctttggcaaatcctaaagcactattaaagccggctgccttgccccgattattaataatcgtgaccgttcgtaaccgttgcccatactttgcttgtaatgcttctaaaataatgccggttctatccgttgacccatcgttgacgacaatgatttcatattgatcggttggataattcatttgggttgctaaatgatcaatcgtggcttcaatcgaagcttcttcattatgcgccggcactaaaatcgtgatgaatggtgttccctttttttagataacgtggttgatcttccttctccgttaatagccaataatacaaactagaaacaataaacgataaccccccgataatcggataagaaaccagtgtgtagattaatatttgggtgaaatagtctatcaatagcatatatcaggcctcatttcagagcgaattttaatcagctaacaatgaaatcatatcaacaactttcctcgataagtcataaaataatcctaattttagtttaaaataactgtcaataacaatagttgtctatagctcaatagtaatatggtgcaatctaccgtgtcaatttaagggattatggttttcataaggtcatcaaaacaaaaaaagagcaccgacgaatttcgtcggtgctcttggtcacagcctaacgctgtgcttcatcttgatgtaacttacgcaataattcgtcgatatgttcaccataacgaactgaaccatcttgttcaaaggtaatttctggaatcttgtataacttaatccgttggccaagttcgctacgaatcaagccttttgctttatccaaacccttttgtgctttttcagcatcactggctagattagacaagatactgtaataaaccttcacgtgttgtaagtcaccactcagattaatatctgtaatcgttaccccttcaactcggggatcacgtacacgttttaataaaatatcattaacttcacgttgaatttcttgttcaacacgaccgacacgatgtttcatctgtagtcctcctgtaaattaattatttaacaggtacttcttccatcacgtaggcttcaatttgatcatcaatcttgatatcattgtaatcttcgattgtcacaccacattcaaagccggttttaacttctttaacgtcatctttgaaacgtttcaagcttgaaagtttaccttcataaatcacgatactatcacgaatcaagcggacaccactatcacgtcggataacaccagtatcaacgatacaaccggcaattgtcccgatcttagaaacattatatgtttcacgaacagttaattgacctgttactttttcttcgtaaactggttctaacatacccttcatagcagcttcgatttcttcgattgccttgtagatgattcggtgtaaacgaatatcaacttgttcagcatcagcttggatcttagcttgtggtgtaggacgaacgttgaaaccgataatgatagcgttacttgcagcagctaatgtgacgtcactttcgttaatcgcaccaacggcttcatgaataatattcacgcgtacgccttcgacttcaatcttccgtaaactaccagctaaggcttctgttgaaccttgaacgtcggctttgataataacgccaacttcttttaattcaccttgtttcattgtttcaaacaagttatctaatgtgacagggtttgaacggctacgttccttcaagagggcccgtttagcacgttcttcaccagcagcacgagctgttttttcgtcttcaaagacaacgaaacgatcagctgcttgtggcacatcatttaacccagtaatttcaactggttctgatgggaagacttctttaacacgacgaccgcgatcatttgtcatgacacggacacgaccaaaggtattcccaacaacgattggatcaccgatccgtaatgtcccttgttgtactaataatgaggcaacaggtcccttacctttatcaaggcgggcttcaataactgtcccaaccgctttttgatcacggttagccttcaattcaagcacgtcggcttcaagaagaaccatttcaagcaagtcatcaatgttttcaccagttttagctgagatcttaacaaagattgtatcgccaccccagtcttcaggaacaaggccgtaacccattaattgttccatcacgtggtcagggttagcacctggtttatcgattttattaaccgcaacgataattggggctttagcagccttcgcatggttaatagcttcgattgtttgtggcatcacaccatcatcagcagcgacaactaagatgatgatatcagtaatatcagcaccacgcgcacgcatgttagtgaaggccgcatgtcctggtgtatccaagaatgtgattaaacgatcgtttaacttcgtttggtaagcaccgatatgttgtgtaatcccgccggcttcaccatcagtaacgtgactgttacgaaggttatccaataatgttgtcttaccatgatcaacgtgacccatgattgtgacaactggtgggcgacttacaaggttagcatcactcttagcttctgtttcaaagactgaatcaatatcagcgatatccacttcaactttttgttctgcttcgataccgtaatcagttgctaataattcgatcgtatccttatcaagtgattggttcatgttaaccataatgcctaacatgaataacttcttgataatttcagctggttcgcgatgaatcttcttagcgatatccgcaacgttcatcccttcagagaaaactaatacttctggtaatggacgttctttacgttgtggcatttccttcttagctgcgttttgttcagctaattgttgcttacgtgtcttcttacgtttcttattgaaacgttgttggctattgccatagctgttataaccaccgccacgttttttatctgggccaaagttctttggcttgcttgctgtattgcttgatgctggtttagaagcactaacagtattagcttgcattttttgttgcatttcttgtgcagaaactggccgtgatggtgtcgttgctggacgactgtttgttggtcggttattcgtcgtattaggacgtgcactattgttattgtttggacggctgctacctaatgggcgaccatcttttgtaacggttggtcgtggactgttagtcgttggacgggcaccgtttgttggtttgccgtttgatgggcggttgtttgaagcattgtttcttgttggacgtggacgacttgcttgttcacgacgcttcttttcgtctgcttcacgttgttcacgttgttgttgaatccgttcttgggttctttgacgacgtgcattagcctgtgaaatctgttcttgtaagctcattggatggttagcgcttgttgaacgattttggctattgttatttggccgactgtttgtgttaggacggctgttattaggacgagcgctattgttgttaggacgcgcattgtttgtccggttttgaccattgcttgcttgaccgttacggttagcattagcttgtggtcggttgtttgaatgttgcactggttttttgtcggcttctgggcggcgacggatagcagttttactaatcttgatcttaccactttctgatttttcgctcgctttaggtgcggcaggtgttgctggtttacttgcagctggtgttgcttttgtttggaaagcagctcgcaatgttttttcttgattatcatcaattgttgccatgtgattcttgagatcatagccttttttgttggcagtctctaaaatgtctttgctagcaacattaatttctttagctaattcatagatacgttttttacccatatcttcacgctcctttattatcccagtagcgttatcatctttttggcaaacccagcgtcgacaaccgctatggtggctctatgtaatccaattgcttgggttagttgggccgcggtgtaggcctttgtttctgggattttgtagaaatgactcttatcagtcaatttcttctgcgtcagtgggctgatatcctggccgataaaaaccaatttagcttttgactgctgaatggcttttaggacctgttcttccccactgaccagttgccttgctctcatacaaatgcctaagagttgcaataaacggtctggttgttcactcattttcgttctccaaatagttcttgacgggccttttgatggtcaacatactcgaacaattctgtgtaaaagtctgctgaaacatcaatgccaaaagtcttttctaagattttcttagcttgcgcggtcttaatcgcatctggttctaatgaaacataggcaccgcgaccagatttcttaccagtcggatcgatactaatttcgccttcagcggttttaacaattcgcaccatttcttttttaggcttcatttcttgtgaaataacgtcttttctcattggtacttttctttgtttcatcatgaacacctcacttattcttgtggttgttcttcagaatcaacaacagtttctgctggttgttcgatgtcttcagcaacttctgccgtttcaggggctactgcaactgtttcttcagtagtagtctctggtgtgattgtttcttcttcgaaaccttcaaccacggctgattcatcttcactatcatcgccatcgacaaattcgacttctgattcaggtttgatgtcgatcttgtaacctgttaacttagcagctaaacgggcattttgaccttttttaccgattgccaatgacaattgataatcagggacgattaccgtacatgtatgttcgttgccatcattaaattgaacagcgatgacttcggctgggttcaaggcatttgcgatgtagtctgaaggatcttcttcccacttcacaatatccatgttttcgccgtgtaattcattaacgactaattgaacccgttgccccttaggaccaacacatgttccgactggatccacgttaggatctgttgaacgaactgccatcttagtccggtcgccagcttctcttgcgattgacacaatttcaactgttccgtcataaatttctggcacttcttgttcaaataaacgttttaccaaatcagggtgtgtccgactaacaaagacttgcgggcctttagttgtgttttccactttagaaacataaaccttgatccggtcatgtgcgttatacacttcgttagggatttgatcttgcttacttaaaacagcttcaatcttgcctaagttgacgtagataaacttgttatcgcgacgttcaacaatcccttgcataatttcgttttcgtattggctgtattcgttgtaaataatacttctttcagcttcgcgaacccgttgcataataacttgcttagcagtttgggcggcaatccgaccaaaatccttaggtgtcacttcaaaacgaattgtatcgccaacttcatatgctttgttaatttctaaagcatcttgatagctaacttccaaacgtgaatcgaaaacttcatcagtcacttctttgacagcataaacgtggatgttacccttcttttgatcgaattcaacttccacattttgagcttgaccgtagtttcgtttataagccgaaacaagcgctgcttcaagtgcttcaatgacgatttctttcttaacacctttttcttgttctagcgcatctagggcgcctaacatttccttgctcatgtaactagcctacctttactaaaattcaattgctaagcgagctttggcaatttccttgcgattaaatgtcacttctttttgacgcgttttaattttaatggctaatgttaaggtctcttgatcaagcgcctttaatattccttgataaatcttctcgccatcaacggcttgatataacgagatatgaatgtattcgccaagtgcattttgaaaatcggcttccttcttcaaaggacgctctgcaccaggtgatgaaacatctaagaaataagcctgcggaattggatccgggtcgattgaatccagtttctcacttaacgcatcgttaactaaggcacaatcttcaaggtcaatgccgtttggtttatcaatgaagacacgtagataccagctactaccttctttaacaaattcaacgtcgactagctcaaaatggtgttgatctagtatcggcacgagtagatcatgaactgtttccacaacggtactcaaatgattccctccaattcatttatatattcagattagacgtgctccaataaaaagagtgagcatttctgctcactcgctctgaagtatctaattactgataacaatataacataattttcatgaaaatacaaataaccgctttaattttcagtggttgcgacgctattttgcgtcttacctgtcgtcaagatttcatggaagttttcaaaactaatttcgaccatgttcttgagggcttcgtcagtattcgaaccaacgtgtggtgtcaacaagacgcgtgggtataaatcaattaattcttgggttgtcgcatcaggaactggttggtctgctggaaattgtttgaagaagatttcgccttcagctggtaatacgtcagcggcaaatgcgccaagttgatcagctttcaaagcatcgataatcgcacggttatcttgcaattgaccccgagctgtattgaccaagatggcatcattcttcattttcgcgattaaatcagaacgtaaaaatcgtacccaagccgaagtcaatcagattatctgctggttaaccagttactcacaaagcgacctcgatacccaacttgcaaaagacatcacctatcaaacgttcttcgaggaagcaccgcagatgaatccgaattgcgctctcatcaccggtgtggtttgtggcgtccgcgtggaggacattgaagccccactgatgcagaagattcactagctggataagttggtggatgaattggctacgggaaagacgatggagaagatattgagatatgaatagttacttattagttaatatggttccattttttaatttcagatataagagtacatacctgtttctttaaatctaatatttgaatatcttcaagtgtcatctttgatacaatttctttggattctctaactttattagcagtataattcttgccatcaattgatgattctctagctttataaagattatttaaatagttatcaattttttctttttttccaatcgttggaaattctgcttgttcaattccatatattcgaccaagtaattcaccaggtaaataattctcaatttcctttccagcggtaatccagacgaatttcccattttcaataaattctttttttattcttgcttttgtattattaattttcggatgctcttctgttcgatcgctgtccataacaattatagagtttctatttgctagcaataaatttattaaatcgttggcttctttactctgggcagttaaatgagataacaatcggccaccataaaaaagaatttgataatgtttattttctatcaattcaccttttgatagaatttgaatccatttatttatataaactcgatctgaaggtccttctacccagattattccgttggcttgtaacaaatcactaccgcgaatatctaaatcatccaaaattagattattttcggtgaaatttgatgctctctttgcaataacacctgattcctcttttcggacatgaattatttgagcggcttcatctttaaataacatattaattggcacgctagaatgactcgtaatgaatagcatttttttgtgttctttaatccatccgaacatatagctgaatagacttctctgaatcgccggatgtaaattattttctaattcttcgaaaatataaatatctgattgtttctctaaaattagttttgtgaggactaacagaattgttctcaacccacttccagaatctgaaagtgcgatttgccccttatctttctctactaaaaaaacttcccatagtgaattctcatcgtcagatatttcctggactaaaatatcttcaaagaagttttcaccctccataactttatttaatgccgacagaagatcgacttttacttttgtcccatcatagctagctttgtttaaaaacaagcgaattaaattagttacacctgaaccgtcttctttagtccaaaccgttgtagttgctttttcactaaccatattacgatcagccgctaaacgactaatagtcatctgattattagctttaatattccttgtaatcagttgttgaaacacatcatctgcaatatgaaaatccacactagaggctttttctaaatcaatagacgatacttgcacatcagttccattactagcaagacttacaataaatgtacttccaataaaattctttccaaaattataatgatttccgcctattttccctccgcttgtatttttaggaaatcccaattctatttcatcttcgcccaatactatatgcgcaatagttcggtcagtttgttttacaaatccgttgaatttatctatttttaaagccattacactatctaacagacttgattttcctatattattctttccaattattagattaattgttttaaattcttcaaaaccgcttaactcattacttgaaaaatttttatatcctataaattgtaatgaatttaacatgtttcccctccaacttgtactcacatatcagattgttactattatttagtagttgtttccattaactcattttccccatttctaatatttaccttctgctatcatccggataataaaattattgtcctgttcagcattcttttgaatatctgttcctaattttctatctactaacttaatgtcatccaatcgatgaatgatttggcttttaatgattgcattgtccgaattcatagtttttctaaaatattgtccaattatttttttgaatttctttttctccaataatttcaacatcaaatgcatattgtgccatcgaatacccctatcttttgaacttgcccacattaaagagttttgaaaaaagagattttctagatcagctctaattcgaacatttttatagttataaaaaaacacctgaattatttggcaagccggaatttgctgattagaattatttaaaaccgatagaatatttgcaatctcaatcgaattctttaccccaacacattcaagtactaataagtgacacaaaacaagcatcgaactatccattgaacttatcatcatattttttaaagaactaaaatcctttatttttttaattatatcgagttcattttgcatctcaacaattaggcttttatcatatctcattaagaatattaatagtctataggcactaaatttatcttctgccagcaaatcaggagctattattgtttctacagcagctttataaacatcaaccaataagcttgtatccacatttggatttccatggattaagatattctcaatttcaaagtatggattagttgcatacatactgtaatttccattaactccctgagtcttatttcttttttttattgccttaactctatctgcaataattatattttcagattgctcattcttattcttatcgaatagatactcactctcataatacttcttccaattacgctctatatatttttccataattgtattatgctctaaatcttggttttttagctgaacaaaaattagttttattttttcaactaaatccgaatctttcgtattatccaaaaatttaatgagtgtatcaataattctatttgaatcatcactacttaaagatttgaagtcaatagttctcccaaccagaattaacgtttccctatagtatcttctgcttgtagatgacaatatcttcaaacaaaactccaccatataattatcatcaagtcgtctacatattccttttaagcagtcaaaaataatgggttgtacaaaaatagtactactatcgtcgtttaaccaactatctattttctttcttaaactattccaatacagagtaaaatcagagtcattcaaataaagtcctattgtgcgcattgcaattagattagctttaaattgctgatgacttggctttaaataattagaccattcataaatgtcccttgcttctgtttcatccatctgttcaagaatattttcaaaggaccctactattttttctactttattataatctgatgtcaatattgttagttttaataaaagtacaatatatggccaataatctgatgtcacacttaattgatagactaacttttgaataactagatatattctactaatatgcgttaaggaaccaaacatcatcatttgataataattatctgcaattaagtttcccaaaaatgagagatccccgtaataagattctctataattatttttcagatcatgtttctgtcgatccttttcaatccaatccaaaagttccttttcatttctatcaacaattggataatatactctatctttttgctcatttaataaattttgcccataattattcctgtgaacttcattattcaactctgcaatttcattttctttatttcttaaatctatcaatatatcttgaatgaaccactcctcgatgttaccatctttcttcgccatttcgaatgcttttcgaagaagttccatagattcatcatgtttttctaaataatatttctgattagaattccatcttatttttactatttcataataattaggtggtagtattttttgtagagattctagaaaaaggtccatattaaagctttctatatcatcattaccaaataaaacagataaaaatttataacaataataatcaaaatttttatcagttttatctacatctatttcatttttttcatcaaatattaaattattaaagaatgctctacaataactattcattagagcttcctttttataaaaggaactactcatcaactgtgtttgtacagttaaattattatcttctgaaacatcattctgaacattcaaagaacgttttattttgtaggtacttaaaacatcgtctactaaatttacggtacaattctcaataaatttattaaaagaagggataactgaaaatttggggccagcgggattctgtagtatttcttgaagttgtgttggctgattgtttctctcttcacagaaataataaagtgtcggaattcgaaacttattaatagtttcgatttctttttttactccctcgggaactccatccttattatcgattaaaacaatacacacatcacttgcttttaattcttcttgataatcatctattgcacttcctgttgaaggccctgcagtttcaaaactatacacagtaaataatcccgtcatctccaatactttttttgcagctgtacgagctaacatatatttttgatcattttcattacttccaatttttgaacttataaaaacttttaatttatttctataattatccatatatagccactccttcttgggttctactaatattataatctatataaatacactaccttaatataatatttgtaagtatcaaaaaaccgattactaactgaaatttcagcaataatcggtaactaataatatattattacttctgtacttctacaataatacggtttataatatcctcaatttgatttaaagaaactacaaaccattctctaggtttaatcaaatgtccgtttggagcagttatttcaacttgtaattgcgttgagtcaagcatatgatgtagaactgtttcaaatttatgagcatcaacatttataatttgataatttctaacaacttcaacaggtgcgtatagataagtatcttcattctcggcattcgcaatgcgctttgacactaatccagatgtatagcctattttataaagatttttaatattattaatctctggattattacttaaacttttcaaaacatagattgatcctgaaagtacatcgttattcagactaaatgagtcctgttctacttcagtaattatttttccacctctagtatacattgatgaaccaaatgcacgacgaagcatctgactttctgttccattttcaaatattactcgcatacgagcattaagtttattatcacttcccataaactcctcacccatagcttgtatataagcaactaaaccatttaaaacgtagaatcgccccacctgtatatcatagttcttaaaagtaataatttttcggataccctgcgcaacatccgcttgcacctgtttgaataaaggttcgaattcagcaaaatcttctgcaacaattcgacttccaattttatccggtctagtaacaggcttttgaacttttgatgtattaaaaatgtcactcgctaattgttccatctcagctggtttccctaaaaaaacatctaatcctgaaagtgcatcatctaaggattcaaaagaatctggtatatcttctaataaaacattatcttcggccaattgtactgactggtctgttcccccctcagacagcaaccctagagtatccaatgaaaatatcttttttattcgttgcttatcccatctactccgcataccatgtaacctactaaacatcgttcgctcaatagatagttcatcagttttagtaggttcccgattatttgcttctacccatctaattacttcttcaaactgtttgatatctggatcgattgttttctgagtgacctgctttttttcagactcgttaaacagcgcctccatctctgcatcttcaaaaacttcacttaaggagtgaaagatatcagccattatttcgtcctcttttcacctgaagttcttttaatttagctaaagcaaacgcgtatctaacttccatatcatcattactctgtttgttaggtagtcgaccattttcttttttaaattgaagtatcttggatgctaaataaactaattcatcctcatcaaaactatatttatttgcatcaattgtattttgaataacgcgtaaagtcgcagaatcaatttcacgagacagtacctcgtacgctttttcaaaaggatttatcttatcaattaaatttatgtctaattcttcaatcttaacaaatttttttcctaacttaataaactggtcacttgtatccgcctcatcatttttctcaatttctgcatgccgcattaccatatctgcaacaacatgttgtcgcactgtctcaacttcatcagatgacaacattggataggttgcttgaatcactttagggactaatacttgatttactactctaccgtcatctttcatatccattttaagcgactgttgcactgcattatcagacataattttttcttttagttcaatcatatctgatttaaggatatccttaaccgcttttgtttcaggttgttttagtcctttaatgaataacgagcctgttaagtcagatttctgtgtcttacttgttcttgttttaaatttaaagtctggtgatagcacctgttccattaatagagatgccgttattgcctttaacatcgtattgacagtatagttaatttcatcattaccggcatctggttgtgcgattaagttggtaaactgagcatgatgcttattatcactatcacgcgtaacccgtccaataatttgtactatttctgttaatgaacctctgtaccctatagttaaggcatactctgcccaaggccaatcaaaaccctcttttgccatacctaaagcaataataatatccaggtcatcaatagtatttacttgtgttcttaaatattcagtcactcgctcacgtccggattccgttacaagatcagcaatttttaaaatacgattactttttttatttcgtacataaattaatccagatatatcgtcaacatgatctacttcgccaattgcatcaataataccgtctacttcgctatacttatccttagtagactctgcagaattcacacttggaatatgaattatcattttcttgtcttcttcaagtacatcacttactgcttcagtatacttaccctggtaaaaatgatagcctatactaaatgattttagaaactgatagccgtctaattgctcgtagtaagaataagttactttatcaaatttatcttcatcaatagcctcaagtatcggtgtgtcgtcgcctcggaagtaagaacccgtcatagctaaaacatgtgctgtagaatttcgcataatatttcgtagggcatcccctagtaccgaattttctgatgcagaaacatgatgaaactcatcaattgccagtaaaacattatcgaactggcggtcattatcaatttgctgataagcaaatcgtaacgttgcatgagttaaaattagtaccttatcttctgattctaaaaatctcagtaccgattttactttaccttgatcacttcctggtgatgttagattattctgttctttaacattccaatcaaaatagtacccatatttttttaaatcagtagatgcaaaacttgatccaatagagcgttctggtacagcgacaataactttatcaatattttgattatttagtttatctagtgctacaaacataagtgcccgagatttccctgatgctggtggggctttgactaataaatattgacttttacgtttctcataaacccgctcttgcatagcacgcatacctaaatcattggtatttgtactttttccagttgcatgataactaacatcaactaaattttcagtcatcttttgtcatctccttatacatatttaatagaacacccagtctttcctgatcgtccttaaaaggtgtttgacgatatgcacgttcaacaataccgtctaatctttcatgcaatactcgtaagtcccttggcatagttttattattatacagttctgataaggttagcccatactcttctcgcaaatcaaaaatatctcttactactctatcaacttcattttttcgttgagtagaaaatattggaattggaaaagtattgtataccatttcgacagaataacgataatcagactttaactttccggaaattacttttatccataccatatgcattctcgacatcaaagtaccaaccaaccataattcaggattatatagcacaaagtttgggtctgatatttttacatctttatcaataagtcccatcggtagataatcccgattacttgatgatgactgaggtataaaaagtcccatcaattcctcattccgaacattctgtaattgccaaggtgccagtgtaagtccgatattttttttatttctagtttcagaaaccttttttagtctttctttaataataggattagttttaaatatttttgcatcactatcactcatccacaaaatatatcgatacgtattatttgtaaattcttttccaccaataaatttagaaaaaatagaattcaattctggaaatctgttaattgattcattatattcagaaattgagaaaatcagacctccaccatcatttggtcgatttccaacaatcagtgctggaagactagaaattgattttgttcttctacgaataataaaattatcatgtggaactaaatacgcattaatatttctaacaattgaaacttcattatcacgatatatctttttattttcattagttaagcttctcatgccaacaattgaaacaattacatttgctttgttctttgcactatttttccatttaaaagatggtacagcaaaaaatatttctaaatctctttgaaatattagcggccacagcgtactaacttgggttccttggtttatagaattcgtggttacaaacgcaaaactggccttagaggtagcaatatatcttgaagccaattcaaaccaggcagcaatataatctagtcgtttataattctttttaaaaacatgctccatgtcagacttctgctcgttattctgttccgttgagcccttatacggtggatttccaaaaatataaatttcatcatttttcttgtgcggtaaaaattcttgccagtcaatttgaagagcatttcctaacctaatatctcctactttttgcaacggcaacgttggacgaaccgcattagggattacgctcataagttccatattcatttgatgttctgcaatccataacgataaacgtgctacttcatgcgcaaatgggtctatctcgataccataaaattggccaagatggacacaacttttttcatccggattcagtagattaatctcaattacagaattgattattttacgaatttgctttaccttattgcgctcttgcaaattgcttttctcaatcaaactaatttgtgtctgcattatcttaatctcaagacggcgaatttctttataagtaataattaaaaaatttcctgatccacttgccggatcaaaaaactttattttggaaatacgatatcgtaaattattcagtcttctttgctgttctaaacgatccgataataaaattatatcttcaaatgttttatttaattcatctaaaaataatggtcgtataactttcatgatattaggtacactagtataatgcattcctaaatgacttcgattgtcttcagtcgcaacagactgtaccattgatccaaatatatctggattaatatccttccaattcaaccgctctccagcttcgataattaatttacgtgatttagtgctaaagtttatcggtctatgtggttctgtaaataattgcccattaacatacggaaagtcttttagccaagatggtacattgccccgatcatgagtatctaataactcaaaaatagtcgttattatatcattcatatctgaaccgtcttcggctgtcattgttttaatcgcatttgtgaaaataaaatctttcattatgttagtatcttcagcaaatagcataaataaaatacgaatcagaaatacattaaaattctgttcttgatccaaagtcatctctggattgtctttacgtaaaacatcatacaatttagcaattctttccgcggccttaacgtcggcaggattttcatgatcgtagtcagctttttcgataccttgccaaggaagaaagaaatcataattgtatgcaagttctcgaatatcatctaactttaaactatcattagttttattatctttcgcaagaaattcactaaaattagttactactgtaaaacgaggttttcctttactattatctaaaattttttcaacctcagaaaaagcctgaaatggattactatctgtcaatcgataataaagtttatttttaagatgcaaatcaccagaggttgttgctagatttgtacggtcactcgattgcacacgcgtaactgttgcctttggaatacccattaaaatcataaattcataaataaagttttctggtttattctgctctataagtgctataattttatcttccaaatcaattaatgccatatttgcactctcaattctttaatttttaaataaagtttaaaattccaataattctgatagccatttaaagttctatatttctaatactactggtctaccttaattctatcatgtttatattttatatactctctttctcctaaaaaagaaacatacattaactaaaattattctattagtaattcctgcttattgaatatatttattactcgtttctccatctatttatgaactaaattactattattcataactctagatataaaaaatccctttcacttttaaatttagttagcgaccaatatttagccaataaaaggattttctgtatttaacgcctactatagataaatatttcaaatttttatttatatctaattaataacgaagtctataacacttatttaagttatttgaatttaacaaatctttaaaaatttggatttatatatatctgtctagcttcacacattcactttaattcgtttactttgatttaaaactagaacatcctaatttccaataaaaagacattgttttaattggtatttttatcttattcgttatttagtttattcatcatatttattccaaattccgtcattcttaccttttcaataccatctttatctacatagctttcaattagattaatttgttctaaccaatttctagcttttaaagcatcttgttctaaaacatcatacccaggtttaaaagagcttatttcatcaataaagctagttattgtttttattccagtaatccttagcgaaagaaatttaaataattcacttagagttacctccatagtctcttcttttattgttgtgcttccagtaaaaatatagattctctctgtgaaatgtaatgatatttttttcttataaaaactttgatttaaatctggttccttttctaaatttgtaacagtagctatttgcttttttaacgcttcattttcgtttttcaaagaaagtatctgttttaaaagatcttcattatttatagtagcccctctactccaacccggtctttcaatttcattttttgcttgcataatagaaatggcaactttccccaaaagttcagacgaatcatgccatacactagctagcctattctgcattgctttaattttaaattcggcaagttttccttttaatatatcatcagtttcaattttttcgtcctctaactgaactgagtcatccagtgaaaatacgagtaccggaattcctttatccatagcataattatattccatttccgtatagctaattcccgtttgtttattaatagaaccatatctttttccaaggattaagatatagtaatcacataaatcaattactttttttatcacattaaactgttcatcatctgttgctacaaatgattccattcctgcaggtatgcaatcagccattagtaaaacatccaaaacttgttttcgttctttactcaaatccatataagtagagcttaaaaaaacttgatattttattttttccattttaatctcccttagaaaggttacttccctacattatatcagttaacaaaagtcgttaatagaactcacccacttttcactgtacctcatttcaattttacgttcttaaatctaaaaatagagcctcattcctcgctgttaatcttcagcaagtgaacggggctctattttttacatcatatcaaacaacgataattgattttcatctggtaagtcatttaagacgttattttctgttaaatattcgatcaatgttttagagactttcccacggttcgataagtcttccttagataagaaaggtttttcttcgcgggcggagacgatttgcttagcaacgttatcgcccagacttgggacggcgcggaatggtgcgagtaaggtatggtcgtcttggatcaagaaatcagatgaatctgatttttcgatgtcgaccatcttaatcgtgatgccccgttccaaacattcattggcgatttcaagcacggttaacaagttcttttctttcgtgctggcttccatccctttatccgtgatttccttcatacgcgccttgacgccttctttaccttgggccatcgccacgaggtcgaagtcactggcccgcacactgaagtaagcacagtaataaataatggggaagtacactttgaaataggcaatccgaagcgccatcaaaatataggcggtcgcatgggctttcgggaacatatatttaatcttgagacaagaatcaatataccaatccggcacgttttcattatcgcgcatggcttgttgccaatcatccggaatccctttgcctttacgaacacgttccataatgttgaaggacatactatcgtccattccccagtgaattaaatccatcatgatattatcacgacaaccgataacgtctttcagggtgacaacgcctttattaatcaattcttcggcattccccaaccacacgtcggtcccatgagaaagaccagaaatttggagtagttctgagaaggttgttggatgtgtttcttccaacattccgcgaacaaaacgcgttccaaattctggcacacccaaggtgcccatcttcgaattaatctgttcaggcgtcacgccgagtgaatcagtccctgagaacaaggccatcacgcccggatcatcagttgggattgatttaggatcaatcccagagagatcttggagcatccgaatcatcgtgggatcatcatgccccagaatatcgagcttcaagatattatcatggatcgaatggaaatcaaaatgggtggtcttccaagcggcatcttgatcatcagctgggaattggattggcgtaaaatcatagatatccatgtaatcaggcacaacgataatcccagctggatgttggccagttgtccgtttaacaccggtcgagccttttgccaaccgatcgacttcagccccgcggaaagtttgttccgtatcacgttcataggctttaacataaccgtacgccgttttatcagcgaccgttccaattgtcccggcccggaacacgttattttcaccgaacaagaccttcgtataattatgggcgactggttgataatcaccggagaagttcaaatcaatatccggcaccttatccccgtggaagccaaggaaagtttcgaacggaatatcatgaccatccttatcaagtggcgtgccacattcagggcaatctttgtccgctaaatcgtaacccgaaccaacttcccctttggtaaagaattcggagtagtgacagttagaacaccgataatgcggtggtaacgggttaacttcggtgatcccggtcatggttgcgactaaactcgaaccaaccgatccccgggaaccaaccaagtacccatccttgccactcttataaaccaatttttgagaaatcaggtaaataacggagaatccattcccgatgatactcttcaattcctttttcaaacgggcttcgacaatttcaggtaactcagctccgtacaattcgtgcgcacgattcatcgttaaggtttgaatttcgtcttcggcaccggccatcttaggcgtgtaaagtttatctttaaccggtacaatttcgtcgatttgatcggcaatcttttgtggattggctacgactaattcttgcgctaattctggccctaggaagtcaaaggccgtcagcatttcatcagttgagcggaaatgaacatctggtaacttcgaacggttcaaggggttggccccgcccattgagtgaatcagaatcttccgataaatcgcgtcttctggattcaaataatgtgcatcgccagttgcgacaactggtttgttgagtttttcgccaactttaactaagttgcgaatgatttcttcaagtgcctgattgtcgcgcaccaattcacgttccaataatggcgcgtaaaccgctttgggcatcacttcgatataatcgtagtatttagcacgatcgagcgcttcgttataccctttttgcatcattgcttcaaagacttcgccattactgcaggctgaaccgactaaaattccttcgcgcaaagcatcgagtttactcttaggcaagcgcggtgtccggtaatagtattcagtcattgaggctgaaaccaatttgaataaattcttcaaaccagcttgggtttgcgccattaagaccgcgtgtgctggacgggcttgtttgtaaaactcgccgaccccgacgcgatcatttagttgattgacgtttaccatatcgtaattttcagcggcttctttttccaacttatacaataaataaccagttgattcagcatcggcattagcccgatgatggtgttctaggttgatcttgtagcgcttggtcaatgaatccaacttatgattcttgtattcaggatgcaacatccgcgataattccaaggtatcaatgactgggttatcgatcaggtcaatatcgttccgttcataacccgcgttcaagaagcccatatcgaaactaacgttatgaccggctaaaacggcatcgccagtaaattccttgaacattgccaagacttcagcttccttcttggcaccgtggaccatttcgttggtgatactggtcaattgcgttgtgaaggctgatagtggtcgctctggatcgataaattcatcgaacgaggcgacgacttcaccatcgcgcattttgaccgcagccaattcgataattgaatcgtaaacggctgacaaaccagtcgtttccacatcaaaaattacgtattcagctgattctagaacttggtcgcgcaaattataaacgactggcgtgccatcgttgaccaagttgacttcgacgccgtataaaatcttaacgccgtttttcttcccagcggcataagcatccggaaaggcttggagattatagtgatcggtcacggcaatcgcaggttggccccacttagcggcttgtttgacgtaatcgccgattgggttggtcgcgtccatttgagacatgttggtatgcaaatgcatttcgattcgcttaccttcagtcgctgtatcttcacgtttaggatgactaacttcaactaaatcgttggcgttaactgttaaatcacgcatgaagttatcttcttggacactcccgcgaaccttaaaccacatgcctttatcaattgcggcgaataaactttcatcgctagcatctcttgagaacttcttgaccgtaaatgaggatgagtaatcagtcatcttcaagattaataattggcggccagaacggagtacccggacttctttatcaaagataaagccttcaattacgattgagcgttcctcttcagtgatactaatcatctgacgaactggttcagctggattaatcccgcgacccatcacgattgggccatcaattggcttgccttcggttttacgtttttctttgagcgcttcgtttttcttgattgcttcggcagctgcttgcgcacgttcagcatcttgcaccgcccgttttgcttggaaatcttcaattgatttttgagaagctgattcgtcgattaatggttgaatcgcaaagttggggaagcccaggcgtttatagccggcttgaatcgtcgtttgcgcttgattgatgaaaaaggttttaacaatgtcattttcaacaaccaacaagactttgcggccttcaatatagggcgtctccttggcacataattcatgcaagagtgatgattgaatcccactatgattgacgacatattcccaataagcggctaaaacaccaccatcaagttctttagcatcggtactgatttcaattgaaacggccgcaatcgcttgaaaagccgcttctaaatgttcttcaaatgctgtgtaaaccgcaaagggtaacacgttatcgaagtgtaatttaaaggtccaccgttttgacgtttcgtggacaatcacttgctcgacctgccccgttttaaagccgggatagtgcgcgacatccgcaggtaaagcaatctgttctaataatttttgaaacaatgcggtttgatctaatgccacaaaagggcctccttctagtgatacgttgaattaaaaagaggccgaaaagtaacgattgcctataaacatgcaatcttgctacttttgaccctttttaaaccttactcagtgacaaaaaacgagtctgagacaaaagcaagtttcatcccaggctcgactaatgtcagttcatctttatttttctgaggctaacaaaatgctgagggagttgattaattcatccttcttcacttctaatgtttcgcctgttttacgtaatttaacttcgacgatttcttcggcagctttcttaccaactgtgattcggattggtaacccaatcaaatcgctatcggcaaacttaacgccagcgcgttctttacgatcatcgactaagactgaataaccagcttcttctaacaagccttcgatttgttcagccaattcaacttgtgcatcatccttaacgttcactggaacaacgtgtaagtcgtatggggcaatggcacttggccaaaccaaaccattctcatctgcttgttgttctgtgattgctgataatagacgactaacaccaatcccgtatgaacccatgatgattggtttagcacgcccgttttcgtctaagaatgttgcaccgaattgttcagtgtaacgtgttcctaatttgaagatatggccaatttcgatccctttagtgaattgtaatttaccttcaccgtctggggctgtttcgccttcttgaacaaaacgtaagtcagcatagtctgcgacgttgaaatcgcgcttgctgttgacgttgaggaagtgatgatcagcttcgttagcacctactacggcgttaacaagtgcttcaacactgtaatcagcaacgatttgaacatcttctggtgcattaacgggtccgattgaacccattggagcgttcatcgttgcttgaacttgttcagcagttgctaggtctaagaagtcagcatctaagaagttcttcaacttaacatcgttgacttcatagtcaccgcgtacaagcactaagactggtttttcatcagcaatgaaaagcacactcttaataatcttttgagcgggtacttctaagcgtgctgctacttcttcgatagaatgtgcatcgccagttgccactttttccatttctaattggacatcagttgaactttgaccaggacgaacccccgttgccatttctaagttagcagcgtagtcactttgatcagagtaaacaatcgtatcttccccgatttcagcaatcgcagaaaattccattgaatccttaccacccatggcgccggcatcaccaacgattgcgcggaaatctaaaccgcaacgttcaaaaatgttcgtgtaggcttggcgcatttgttggaaagttgtatccaaatctgcttcattagcagaaaatgaataagcatcttgcatgatgaattcacggccacggagtaaaccataacgaggacgatcttcgtcacgatacttcgtttggatttgatataacgttaatggtaacttcttgtatgatttaatgttattgcgcactaaatcagcaaatgtttcttcatgtgttggtccgaggataaagtctcgtgaatgacgatctttgaatttgaataagttagggccataagttgcataacgacctgattcttcccataattcagctggtaaaataccaggcatttgcatttgtactgcgtcgatcttgctcatttcatccttgataatcgcttggatattttccaatacgcgataagccaaaggtaagtagctataaacaccagctgagacttggtgaatgtaacccgcacgaagcatcattcggtgacttttagcttcagccgaattaggcacttccttgagggttgggataaataattttgattgtttcataaattgttacgcctccaaaaatattctaaaagaaaaatcgttgtatatcgttccacgtgactaagaccattaataacaccataataccgacaccgattaatgtcacgatgccttctttttcaggtgaaattggtttgcgacgaatcgcttcaataatgttcaagactaacttaccaccatctaacgccggaatcggaattagattcataatccccaaattaagtgataagaatgctaagaaataaactaacgcattaaagccttgttgggtaaattgggtcgtcattgaatacatgccgaccggccccgataatttatctagtgagaacccaccggttaaaaatgacccgaggatcttgaaaatctgactggcaattgaccaagcttgtgtaaagccgtaagaaatcttggcctttaggctatgattcattttgactttttgtgtgacccctacttgaccaaccttttctttttggttagccactttgacagccttgggagtcaccttaattgtcttttcagttgcgccccgttgaacgcgcaccgcaacagtttcgttagggtgttctgaaattatcgcactaaagtcagtgaagctcgctacttttttgttatcaaccttcaaaagacgatcgttggcttttaagcctgccttttgagcagctgaattctcttgtaccgtgccaatttgattggattgctgtggcacacccccgcttagaaaagcgaagaggataaaggctagaattgcgaggatgaagttattaaatggtccggcaaagttcgttaacatccgattaatcaacgttgctgattggaattggacatccacgggtgcgatttgcacttccgttccatctgcttcgataatcgtcgcatcatgtaagacgggataacgtttcatttctgactcgtcgccgccttcgtaaccttcgacccacaattccttttgtaaatctgttttagcaatttggaaaggcaccccgtttaacgtggtgaccttgtcacttgtattaatctgttgaacgcgtccttgttcgtccaaaattaaagtcgcttgtgtgcccgcttcaatttcagattcatcgtcggccattcccgccattcgaacgtaaccacctaatggtaaccaccggatggtgtaagttgtgccgtttttgcgagttgcaaataatttaggccccatgccgacagaaaactcacgcaccaaaatgcctgagcgcttagccatgtaaaaatgcccaaattcatgaacgactactaaaataccaaagatgatgataaacgcaataattgcagccaatgtatccgacctcctttttcaataccgtcattcagattctgattttatagggaactgtcttattatatcacgaaatgaaaagaaaaaagagtgcttttgcatgcgccccttttcacagcttgatcgcagaggatcgagttagtgataatgaacggatggaaaaacactctgatttgaatgatagctttaaaaacgggtcattcatgctaaatgatgccaaacaaatgtagtaacggtagtacaaacaacatactatcaaagcgatctaagatgccgccgtgacctggtaggattttacctgaatctttaacgccataatagcgtttgtaagctgattcaaccaagtcccctaattgaccacagattgagaagattaaggttaagcctaacatgattggcaatgagtaaatttgtgggaagaagtataagtaaactgctgcaacggcaacggctaataaagtcccgccaattgagccttcccatgttttattagggctaattgctggccacaatttattcttaccaaatgcacgaccaaacatataagcaccaatatctgtcatccagataaccaataagatgtacatcactgtatcgaaaccgcccaaattacgagcaccggctaagtagtggaagccaagtccaatatacaggctggctaaagttgtgacacccatatcatcgaagtttacacggttcttcgtgaagaccgtgatggctaataagattgcgacgaatagatagaacaaatcaaattgtgaaacaccatctggcaaccagtcaaacgctcccgctggtaatgccaaacttaatacggctaaaccggccaccatggcatctgatgaaacgataatccgtttgcgcataataaagacttctgataatgcgactaatgctaatacggctgcggcgatatcaatgaaaatgcccccactaattaaaattgggataaagataatcaacgcaacgaccgctgtaatcactcgttgtttcataaactgaactgcctcctaataaataaacgtctattttaagccgccaaagcgccggtgacgttgttgataagtaaaaattgatttttcaaaaacttgcggtgtaaaatctggccagaattcatcaacgaagactaattcactataagcgatttgccaaagtaaaaagttcgagatgcgttcttccccactggtccggatcaataattcaggatccgcatactcccctaagaagccagtcatcaaatattgactaatcaagtcatcatcaatcgaatcagcctcaattgtaccacttacggcatctttggcaatctgttggacagcctgttgaatttcatcgcgaccaccgtagttcaatgcgaagtttaaaatcatccctgtattttgcgccgtatcagccatcgcatcttgcgctgctttttgcgttttttcaggtaagtcatggatgttacccatgactttcacacgcacgttttcttcaattaattctggcatgaacgtgccgaagaaatcgacgggcaattgcatcaaaaaattaacttcatcactaggacgcttccaattttctgttgaaaaagcgtataacgtgagaaccttaacacccatccgactagcggctttggtaattgtcttcacattttccatccctgctttatggccagcaactctcggcattagccgtttgttagcccagcgaccgttaccatccataataatggcaatatggttggggatattttccggatcaagttgaatttttgctgtttcttttttatttgtaaacaaaatgactcctccagtttagttactcaacactgattgtaccaaaaattgctgggagtgactatttaaaataatattaaatattttttcaaatcatcatgataagctccaagtatcctattaaatgtgctaaactaactaaataacttttattttcaaaggagtcctctatgaaaaagacattcgaactcttccgcttggattggcggcggattctcaaaagcccaatcgcattcttactaattctcgccctaattatcatcccatccctctacgcatggtttaatatctgggctttgtgggatccttacagtaagacgcaagatttaaaagtcgctgtttattcagcagatcaaagcgtgactgtcgctaaaaagaaagtcgcaattggtgatgaattaatcgaccaattgaaaaagaacgataaacttggttggcagtttacaagcagtaaaaagcaattggacgaaggcgttaaaactggtaaatattatgccggtatttacgttcccaagaacttttctaaggacttaattagctttgtcgacggtaaaattcaaaaaccaacgattatttattcatccaatgacaagattaacgccattgcccctaaaattactagtgcgggcgcgacaacgcttcaatcaaccatttcagaggaacttgtccagacggttgctaaaaccctcatgtcctctctcaataaggctggctttaaactcgatgaaaatttgcccgtcattaaccgtttctcaagtatgattctcaaaacagaccaacagattccggagattaaccaatatacggatcaggtcatcgcactgcaaaagaaaattcctgagatgcaggctaaattaacacaagccaatgacttcgtaaacttcttacccgaagcgaataaaatggctaagaaagtcgtcggcgtcaatcagtacctcccagaagttgaatccgcaggtgccttagctgttaaggtccaagggaagattccagaaattcaaagtgccggtaaacaggtggaaacccttgatagtgattttgacgggattgccaataccttaaccaatggtatttccgaagctaaaactggtttgaccgttcttaataagactcaaaccgtcctcccagaaatcattacctttggtaaatccgcgcagcaagtttctagtcaggttaaaaatgacctgattccaaaactcaaaacgaccttgcctgtcattcaaagtgctgttgatcaaggcttaacgattactgatcaattagcgaaaaatatcgataatgacttaaatgccgttaataaactattagaacaagctaaaaacgatcctgataatcaagaattaaaggctgccttaaagaccaacctcgagcaattatcagcccataccgcaacgttacaagctaacaacacgcaattggcgaataccttgcaaagtttacaagatgcttataatgaatcagcagtcgcagccggcaagcctgaatcacatctcttagatgatccaattcaaaagctcaacgccgctgcaacccatcttggtcaattaaaaactaagattgataacgtgctcgctcattatgatgatctctctttaacggatattcaaaatcaactaaccccaatcatcgcttttgctaagcaagttcaaaataccgtgagccaagttcaaaatgccggtatcggtgcgaacgttaagagcgtccttgctaaattcgaaacgatgattacgcaaggcgatgctgttttaaatcaaatcaacacagctgtgctaccaaaattaccatcactattaacaaatacgcaaaaaacattaaaaacagctatcgattacctcgaaaaatatcaaaagcaaattccagcgctaaaacaagagatccacgatgccaataccctcttaaatggcaatacgggaaccatcgtcagcggtttgaacactgcttctgatctctatcaaaacgattacccaactttgaaaaataaattgcaactcgcaaccggcttcatcaataacgatttacccggtatcgaaaatgatttaacaaccacgctagcaatggccaacgctaaatttccactccttgaaaaagcattaaatgatgccactgatttaattcataatgactggccattcttgagaagtgggattcaaaaaggcgcagaagcaattcgcaaacaacaaaagacagttgatttgaaagacttgatcaaactactccgtcgtgatgctactaaggaaagtaatttcttagctgaaccggttaaattacaagagaaacatgtctatccaattaaaacttacggctcagcgagtgcaccattctataccgccctttgtctttgggttggtgccctcttgctcagtaacatcgtcctcacgaacttctcgttggacgacaagcaaaaagaacgttacagtaagaaacaacaatttatcgcccgttggttgacctacattgtcatcggggtcgcccaagcggtctttgtcgcacttgggaatatcttcctgattaaggcttatatcgttagtccagtagcactcttactactagccgtcttcctcagcatggtctttatgacgattgtttacgtcttagccgcgatgttcgggaatttcggtaaaggattggcgatgattatcctcgtgctctccatctctggtgggggcgggaacttcccggttgtcttatccgataagttcttccaattcattaacccgttattaccatttacttacggcgttaacttattgcgggaaccaaccgggggcatctacgccccaaatctctggcataatttcattattctagcgatttacgcagttgtcttcttcttcatcggcctcttcttaaaagatcggattaatcctttcttcgaaaaactccataaagaagcagccaaaagtaaaattattcattaatccaaaaaaggcgttgagacaaaatttgtctcaacgcctttttcaatgaccgttagattaaccttcagtaatttctttttctttatctttagaaatagcatcgattttctttgttgcttcgttcgttaagttttggacttgttcttccaaatcgtgcatttcgtcttcactaatttcgctagctttttcagcctttttcaagttatccattgcgtcacgacgagcattacggacaacaactttagctaattcagcttccttaccaacttctttagcgatttccttacgacgttcacccgttaattgagggattactaaacggattactgaaccatcgttagctggtgagataccgatatcagctgtgtaaagagctttttcgatatcttcaagtgcacctttatcataaggtgtgattaacaatacccgtgcttcagggattgtgattgcagcaatttggttaagaggtgtcattgcgccataatattcgacgttgacacggttaaccaagcttgcattagcgcggccggcccggatttgaccaagtgtccggcgcaatgaagcttctgctttttccatgttttctttagcttgttctaaaattggatttaccatttttattcctctccttcaatcgttgtaccaatattggcaccttcaacaacctttttaatgttgtctgcttcgttcaagttgaagactaccaatggaatatcattatccattgataaagtacttgcagttgaatccatcacttgtagacctttgttgataatatctaagtgtgttaaagtatcgaacttaacagcactagggtctgtgttaggatctgcagagtaaacaccatcaacgttgtttttagccatcaagataacgtcagcatcgatttcagcagcacgtaatgcagctgttgtgtctgttgagaagtaagggttacctgtcccaccagcaaaaataaccacgcggcctttttctaaatgacggacagccttccgacggatgtaaggttcagcgatttgacgcatttcaattgatgtttgaacacgcgttgggacaccaatactttccaaattgtcttgtaatgccaaagcattcatgacagtagccatcatacccatgtaatcagcttgtgcacgttccatgcccatttgttcgccagtcacgccgcgccagatgttaccaccaccacagacgattgcgatttgaacacctaaatcatgaactgatttaatttcgttggcgactactttaacgatttcaggattgatcccgaagccttgttcaccggctaatgcctcgccacttacttttaagacaattcgcttatattttgtatttgtcatatttaatatccctccgttgattactaggcccattttaccatatttaactaggcatttgggtatgcgattctgaattatcgcaaaactgcaaaaaaaaggagcgcaaattgcgttccctttttgaagcaaatatgcttatttgatttgacccataacttcatcaacgaagttattttcttttttctcgataccttcaccaacagtgaaacgaacgaagcctttaacactaccattttttgatgcaacgaattgtgcaacagtttggtctgagtctttgatgaatgcttggtcgtttaagctgatttctgacaagaacttgttaacacggccttcaacgatcttaggaatgatgttttctggcttgccttcgttctttgtttcttcagttaatacttcacgttcgtgatccaatgtttctgcaggaacatcttcgcgagaaacgtattgagggttaacagctgaaacgtgcatagcaacgtcatgagctgcttcatcgtcagcaccttctaaagtaactaatgaagcgatttggccaccattgtgtaagtatgaaccgaagtgatcgccatcatttttttcaactaattcgaaacgacggaagctgatcttttcgccgataacagctgttaagttgattactgagctagcaattgtgccttcacccattggtaattcttcagcagcagccatgtcagctggtttgtttttagcaattgtttcagcaatatctttcaataaagctttgaattgatcgtttgaagcaacgaagtcagtttctgagttcacttcaacgattgcagcagtattgccatcaatagcaacgccagctaaaccttcagcagcaatccgatcgtttttcttagcagcctttgccatccctttttcacgtaaagcatcgattgcttcttcaacgttaccatcactagcaactagggcttttttagcgtccatgataccaacgccagttttcttacgtaattccattacttgagcagctttaatttcagccataattcgtacctccgacaatttatattaaatatgattggtttaaaaaaagctgtcccacaagtcaggcagtatttgcgaaacctctaagacagcttatttgaatctactatttagcgtcagtgttagtatcgttgttgccttcaactgcttcaacgatttcttccattgagtctgctgatttgttttctgcagcaaatgtagcttcttcaacatcatcttcaccttgacggccttcgatgatagcatcagccattttagctgtgattaaacgaacagcgcggatagcgtcatcgtttgatgggataataacatcaatatcatctggatctgagttagtatcaaccatagcaacgactgggatatttaatttttgtgcttccttgatagcaatccgttctttacgaggatcaacgacaaacattacatctgggatgcgtggcatgtcttcgataccgcctaagaatttttcaagtttttcttgttgtttcttcaacaaggcaacttctttcttaggtaaacgttcgaaagtaccatcttcgtccattgctttgatttccttaagacgtttgatacgtttttggattgtatcccagttagttaatgtaccacctaaccaacggtgatttacaaagtattggcctgcacgtactgattcttcagcaattgcatcttgtgcttgtttcttagtaccaacgaataagaatacaccttcgttagcagcttcttctttaacgaagtcataagcatcgtcaaccatgcgaactgtcttttgcaagtcgatgatgtagataccatttctttcagtaaagataaatttcttcatttttgggttccaacgacgtgtttggtgaccgaagtgaacacccgcttctaataattgtttcattgacaatacagccatgtcaacagacctccatatggttttattcgaccactggtttcacttttttagagaacttgtcgccaagcacctctctagaaatcaaccagtgtgaattattttttggtaatgaaataccgtttaaaagtatactaaagatattcgctagagtcaacctgtaatcccgtttaaaattgggtactttcaatcccgtgtgcgattaagtaccgttccttttttaaacggctttggtgtttaaaggcgtattcggcttttaaagcggatgacttgtccgcaaatgtttcgtaatacaacaaacgcaccgggcgccgaagcttcgtgtacttcgcacctttaccagcattatgtgtagcaaccctttttgtgacgtccgtcgtaaagcctccataaaaactatgatcagcacagaccaatacgtaaaaataataagctttctcagtcatcttctgccatgaataacttcgttcgcatttctggggtatagtcactattttcatcataaattgtaagttccggaagcattcgcaagcctccttttttaccatctttgacggcttcaatcaataccatgctggcttctttacctgccttagggtaaacgaaccggacgcgcttgggctccatgcgtgctgcccgtaattcatcacagatttctaagaatcgttctgggcggtgcacgagataccctttaccattcatcttcaacaaaccactcatcgtttggaccacggttcttaaatccgtcgcaatttcgtggcgtgctaaggctagatgttcattaggattcttttgactattaggcgccaccttaaagtacggtggattacaggtcacaatatcgacgctatcttttttaataacggtcgttacgtcttttaaatccatatttaaaacgcgcaactgttccgtcaacgcatttagttcgattgaacgttgtgccatatctgccaaacgtggttgcaattcgactcctacaatttggccgtttgttttggggctcataaataagccgaccgcgccattaccagcgcacaaatcaacaatcaggcctcgcttgggcaattgcgcaaaatcagctaacaagactgcatccattgaataagaaaagacggatggactttggataatttgaatatctaatcggaataactgatcaattctttcatctgcttttaacatgctactttcaaccccacttgtatttagcccatattataacaaagaccagcgttatttggtataatagctaggtagttcgttaaatcgccttaaaaaaggttttttgaaaggaattaaaattatgtttttctcatttgcccgcttcatcgtgcggattcttgcctggttacttaacggccgaatcaacgttgaaaacaaatcagctttaccagagggcacctacgttttagttggcccccatcggacttggtgggatcccatcttcttcgcacttgctgcaagccctcgtaagtttacgtttatggctaaagaagaattattcaaaaatccaatcttacgttttatcttgaaacacgccaatgcgtttcctgttaatcgtcaaaatccaggcccctcagcgattaaaacaccggttaaagccctacgttcaaaggacttatctttaatcatgtttcccactggtagccgctattcaagcgaattaaaaggtggcgcagtggtcattgctaaaatggcgcgggttccattagtccccgccgtttatcaaggccccttgaaattttcagccgtcttaaaacgtaaaaagattacgattcgtttcggcgaaccaattccagtcgaccctaaacttaaattaaacgacgaaaacttgacaatgattggtgatcaaatgcaagccgcttttgatcaaatcgatcacgacatcaatcctgattttaaatatgagattgacgatcacaaataacacaaaaaaagacgcgcgccaacgatgaaacttatcgttgacgtgcgtctttttagtactctatttttcccaatactgatccaagaattttgcaaccttattgcgataagctgttggttgcttggctaacgcttcaccatgacctgcatctggcacaacccacaattgcttaggcgcattagcggctttgtaattttcgtaaaccatcttcgtcggtacaaatttatctttagcgccatgaatcaacatgattggtaattttgacttagcgagactcttggttgcgtctccttcgctaaagttatacccagcacggacccgcgccatcaagttagtggtataaaatagtgggaacttcggtaaaccaaacaaatcgttgagttgataggccaactcacctgagatactgctgtacccacagtcttcaatcactgctttaacctgtttaggaagcttttcgccagcagtgtacatcacagtggcgccgcccatgctaaccccgaagagtgcaatttggctatcttgaccatttttggcaatcacttgtttgatccatttaacgtaatctaagcgatctggccaaccatagccaatataatccccttccgattcaccggaaccacgatcatcaggtgccaatacgttgtaccccaagtcatgatagagatgaatatagcgcgccatatcctctttgtagcccatatagccgtgtgccacaacgattgttttagttgttttcttagcagctggtacgtaaatcgcgtctagcttaagatcatcagtcgctgacttttgataccacttcactttatcggcttttgccaaccatttctgattgtcgcgataaaatttactaggcttaccgttattcaagaatgacttttgccctggtacgaaagcatattgatacatatacagcgttgcaccaaagacaccaatcacaattaaaataacaacgcttattaaagaccatttaagccagcgtttctttttcatcttctaaaaatcctcctggttattccaaaatgtactaaatgtgtgctataagtcatatccttgcggttaacgccgaatgtcaaacgatggcttacagtcatcattcgccactctctgttaatcctcaggatataaccgacttatagcccactctgtccattttgtaattgatacatttcataatagcggcccttttgcgcaaccaagctatcgtgattgccccgttcgacaatttgaccttgatccaagacgagaattaattccgcatcgcgaattgttgataaccgatgggcaatcgcaatactcgtccgtccctgtcgcaagcgagcaaggccggtttgaattactgattccgtttcggtatcaatgttggcagttgcttcatctaagaccagaatcttcggattggtcactaatgttctagcaaatgagagtaattgtcgttgtccacttgaaaattgtgcgccaccttcaatcactcgtgcgtggtattgtccgggtaattccttaataaattcatctgcttgaacaaattcagcagcggcttgaatttgttcatccgtaatttcatcgttaaacaagcggatattagatgcaatatcgccgtaaaacatgaacgcatcttgtaaaactaagcccattttacgccgtaactctgccgtttgaaaactgcgaatatcttgaccgtcaattaaaatttcgccttcataaaattcataaaagcgcatcatgacgttgataatcgaacttttaccagaaccggtatgccccactagcgcaaccgtttgacctggttcaacgacaaacgaaatatcatggagaatttcatgcttgccatcatatgaaaacgacacgtgtttgaactcaacgcggccatcggtaatttgactagcagcatctgcatcttgggctggtgcaaattccgtttgatccagaattctaaaaatacgacgcccggcaaccatcccatcttgtaatgaggataatgaatccatcatattggtcatcggattgaaaaagttgctaacgtacgtcgtaaaggcataaaccaacccagccgcaacaaaactatgcaacgctgtaagcccaaataaacttaaaacaacgactaatgccaacgtatagagcaaattaacgaccggtgccaacaataaggaattagtccgaatcatcgcttctcttgttttaagataatcttcgttaaccgattcgaattcagctgtgagtcgtttttcttggcggaactgttgaataattgtaatcccttcaatcgattcattcaacttagtgttcaattgactcaacttttcacgcatatgccgataaaccttggcactgtaactgctgtaataccaaataatgactaataaaattggtaaaaaaccagccgttgctaatgcaatcttcggtgataacaaccacatcgcgatgaacgcggagataattgaaaatgaacccactaataatgatagaaacacattccaataatcaattaacgtcatcgtatcattggtaactcgcgaaacaattgatccagcaggtgtttgatcaaaataacgcatgcccaaacgatgcaactgacgaaaaagatcacggcgcacatcttccatcgcgcgttctgatcccattccaaaaagaaaagattgagcgaactgtgtgatagctttcaaaataacccctaaggcgtataacccggcgacccctaataaaatctgagttgtcgctgtttgcttcgtcaagtaacgatccataaaaacttgtaataagcgcggtaacaagatgttaatcgttgctaaacccgccgctgcgatgattgcgccgataaattgtttcttatagcgcttggtgtaaccgaagagccgtttcataatttgaaactgttccttagtcgatatcttttgtgaccattcagattgatacttttgtgccatcctattggccccccatcgcttgatttaattgttgtttaacccacatttcagcataccagccttgttgagctagtaagctgtcgtgcgtgccacgctcggcaatcgtcccgtcatccataacgataatctcatcagcatgcatcacactgctgagtcgattggcggtaataatcgtcgtttgatttgcccgcaacgtcttaaggttcattagaattgcttcttcagtctttgcatcaaccgcggacaatgagtcatctaaaattaaaatttcaggatcagtcattattgcccgggaaatagcaattcgctgtttctggccacccgataatgaaacaccacgttcaccaacaactgtgtcgtaaccctgtgcaaacgttaaaatatcttcatgaaccgcaccagaactagccgctgcttcaacggcctcttgttccttttcaaaatccgcgaaccgaatattatcgcgaacatccgttgaaaacaaaaagttgtcctgtggtacataaccaatactatcgagtaatgcatctaatgtgtaatcccgaatatcgttctggttaatcttaatttggccctgatattgatcatattctcgtaacagcaacttgatcaaagtacttttaccagaaccaaccttcccgacaattcccagtgtctttccttgtggcagttggaaatgcacattcgttaaagttggtgtttgttcttcaggataggcaaattgttgaatggcatagtcgatatcaccagttgccaacgtttgaatggcatctggcttttcaataatcgtgctggtttcttttaataatgattcaacccgatcataactggcattgccacgttcaagcacattgaataaacgaccaatcgcaaacattggccaaactaaggctgcgatataactgataaaagcaatcaattggccaattgtaatactgtggttcatgaccaatgttccaccataaataatcgtaacgaggtacgttagcccaataattaaactaatcgctggatcaaataaaccatcgataaagttgacgcgcttgttaatcgcaattgtcttcgtcacaatttggtcgaaatcatcgatatccgcttcttcttgaccaaacgtttttaaaactttgatcccagaaacactctcttgcgtcttatcatttaatttcgaaaaggctgcttgtgactctctaaaagcggtatgcaaatgcgtccctaagcgccctgaagccactgctaataatggcatcggaaccaaggccattattgtgagccgccaatcgacaaaaataatcatcgcgatgatggttgtcccacctgtaataatcgaatccgcaaacgttaaaataccggcgcccgccacttgttgaatcgcggttaaatcattggtagcatgggccatcaaatcgccagtgcggtgtttctggaagaaagttgtatccatcttcataaaatgccagaacaaacgactccgcaatgtccgttccaacttggcagcgccaccccagatacgagtccgccaaccatagcgaaagagatattgtaaaatcgcggctgctaataagaccccaatccacattaataagaccgatgccttcaactttcgggcagccattaaatcaattaacgtcccaatcacttttggtggcacaatttgtacaattgcaactaggactaaaaaaataacccctaatatatagcggcgatattcttgtttaaaataccagcctaatttcttaaatatacccataaaatatctccgtcttcaaaattagataatcctcattatagcaatcttagttcagtgggacaattatttcccttccaataaaaagagggttccgtacaaaaaagaatttttgtacgaaacgcctctttaattaagtcatgtttattttttactacgtttttgttgcgctttcattgagctcatcatctggtttaatttcttttcagatggtttttgccccatttgcatcatcatagctttcaacatatcttcattaactggtggattttcttcgaaatatttcttcatgtaagcacgtgcgccgaaaaagccagcaactgcacctaataatgccccaatgacaaaaattaatacgcctattccaatattcatatcttatgcaccccttcctcattcagttcacttaaatattctacacattattgcactaaaaagaaagcggaattcctagattaatcgtcacgtaaacccttttcacgttggatgtccttcactttttcaggtgtgacttccttaccttctttatcataaacttgtagcatctcaacttgtgaacggaaactagaacggaaatccttcaaataagcgtcccgtagttcttgacgctccgttgtttcttcaggtgttaacccttctgcttttgctttatgtgctaattcgttaatacgatcgagtcgtttttgatccattgccatcatcggcctccaactttaaacttttatcctattttggactaaaatgctcaaaatgtcaaaaaatacgaacacttgtttgaaatccacctataaatatgctactatatgcttaatagaacgaatgaggtgcgcttatgactaaaactgaatccaaacaattagaggtcttacgttttattcacgaacgtgttcaagacaaaggttacccaccaacggtccgcgagatttgcgaagccgttaatttatcgtccacttctactgtccatggccatttagcccgacttgagaagaagggcttattacaaaaggatcccactaaaccccgggcgatcgagttaacgcccgctggcctaacggcaattggggcgacaccccagaaaatcccagtattaggggtggttactgccggtgtgcctatcttagcagttgaagaagcaactgattacttcccgcttccacctagtttgcaaactgaacaagatttgttcatgctaacaattcgtggtgaaagtatgattaacgccggcatcttagatggcgacgaagttatcattcgcaagcaatcaaccgccgataatggcgatattgtcattgcgatgactgccgaagatgaagcaacctgcaaacggttcttcaaagaagcagatcactatcgtctccaaccagaaaacgatacgtttgaaccaatcattttaaatgaagtcagcattctagggaaggtcgttggcctttaccgagatcgcatgtaataaaaaagaagttcgcttaggcgaacttctttttttgtctgtttctctttaacgcgctttcaccaactgcttgttgatggcgcacttctttattagtattccattaatttgaaaatatcatagtccttaatcttttcgcggccgtttaagtccttcaattcgatgaagaaagctgtcccaacgacgataccgcctagttcttcaaccattttgattgttgcggcaattgtgccaccggttgctaataagtcatctgttactaagactttttggcctggtttaaccgcatctttatgcatatataatgttgatttaccatattctaaaccatagctagctgaaactgtttcgcgtggcaacttgcccttcttacgagcaggtgcaaaaccgacacctaatttgtaagcaaccgggcagccaacgataaagccccgggcttcagggccgacgatcatttcaacgcctttgttcttagcgtattcaacaattttatccgttgctgctgcgtatgcttcaccatcggacatcaaaggtgagatatcacgaaaagtaacgccagcttccgggaaatccggaacacttgcgacataatctttaaagttgattgacatatataattcgctccttaactcttttagcgatttgctactgctgggagagttgctagccagtctttcacctcggtaaaggttgaataaacaagctgtttttccatttcaattttagctaatcgtttttgataacttggtgcactttccagtgcatgcttttcaggttgtaactcggccgtaatcagaccacgttctattctaacaaatccgaggtcaaaaaacacctgcaacatgaaaatcattaacggtaattgtaattttaaatacgctgctaattcagctaaccgcgctttttcaatgttcggatgcttccgtaagtaaactaagaaggtcgcaaactgttgttttgtcggcattccttctaagtaagcagagtgtttggcataaaaaattaagcttaatttagcagcctgttgttgttgataaaattgttcaaaagcagttaaatcagctggttcatcgaccacaatcaactcttggcttgtggcaacttgttcatcggtcgctaacagcgcctgactccctgccggtaaataagactgcagttgctcgcgcattttatcattaaaaaagacgtagtcgcctgttgattggaataattgttttgtcaggcgattgctgcgttgatcaagtacgacttgcccacttgtagcaaggtcttttaccattaattgcaacgtcgtctggccacgccaagtattctcactcaaactcccgactaatttcacatcttcagcggcagttaaatcgggcatcaaagcccctttattgaaagctaaaaccgctaattgttgttgttgatcgaccgccatcatcttcaaatgcttctgatcagcaccgatttgtttgacatcggccaactggggcgcgctaagttcaatcaacggttctggattatcactgccaaaaggtgccagttgttgcaatgcttgatataaatcaggcgtaatatcagctaacgtcagcgccaaatcaactggtaatggttggcgtcctgttaaatctaactgattaacttgcgcatactcgttcattgcagtttgaatcagcgctaattgatcaaccttagcagtcaagccaactgccatgtgatggccaccaaaatgaaccaataattcacggtgggcatctaacgctttaaataaatggaaagctgtcacactacggccagagcctttagctaaaccagtttccgggtcaatcgtcaagactaaggttggtttaccggtctgttcaacaacatgactagccacaatccctagaaccccttcatgccaaccttcgtgggcaataactaaggtggcactcgcttggttttccggtgtttcagcaattgtcattgccatttccgtaatttcctttaccagaccttggcgttttttattttgttgttcaataaattgggcctgttcgactgcttcttcgtcatcaagcgtcgtcaacaattgcacaccaagggtcgcatcacctaaacgaccaattgcgtttaaacggggaccaatcccaaacccaatgttagtagcatctagtgtcgcttgttctaagccagctgattgacacaatgcgaccaaacctggtcgatcggtattttgtaattgttgtaagcctaagctaaccaacgtccgattttcatcgactaaggggacgatatcacaaaccgtcccgattgcagctaaatctaatttatcgtaaggaatctcttctaataaagcagtcgccactttaaacgccacaccgaccccacagagttcgccaaaaggatattgcccctctggatgtctaggatgcacaatcgctactgcgttgggtaattctgctggtaattcatggtgatcggtcacaaccacgtcaacaccgtgttcttgcgcgtaagcgattggttctaggccgctcaccccgttatcaacggtcacaattaattgggtgccattttcaatcaagcgcttgtaagcttctaaattaggcccatagccatccttaaaacggttaggcacatagacttcaacatcggcacctaagtcatctaaggtttccttcattaaagtcgtactagtaatcccgtccgcgtcataatcgccataaatcgtaattttttcgccattcacaatcgcttcttgaatccgatcaatcgccttttgcatatcatgcaaagcgtatggatcgtgaagttgaccgacattgggattcataaaatcattgatctgctctgcatcccgcaagccacgttgccacaaaagttgggccgcagccttaggtagcggattgtcttttgtaattgtttgtaattcatcttcagttggtactggttttaattgccattcatattgtgcttccaaattaatccctcactacttcccagtcattaactaaaccattatagcaaaatttagcacttttcgcccaacttcgccttttgtttaatccgatagatgctatactattaagagtacacctgtattctcaacttagggggaaattccatgtcaattctagttttagggggcgccggttacatcggttcccacaccgttgatcaattaatccaacgcggctatgacgtcgctgttgtcgatagtttggtaacgggtcatcaaggcgccatcaatcaaaaagcccgtttttatcaaggtgatatccgcgataaagacttcatgcggaccgttttccaacaagaagacgtgactggtgtcattcattttgccgccttttcaattgtgcctgaatcaatgcaagcaccacttaaatacttcgataacaatacttatgggatgaccgccttattagaagtcatgaatgaattcgatgttaaacgcatcgtcttttcttcaactgccgctacttatggcgaacctaaatcaattcccatcaaggaatcagatccacaattaccaaccaacccttacggcgaaagtaaattaatgatggaaaccatgatgaaatgggctgacaaagcttatggcatcaagtttgtcgcattacgttacttcaacgtagttggcgctaagccagacggttcaatcggtgaagatcaccatcctgaaacccatctcttaccaatcgtcttacaagttgctgctggcaaacgtgatcaattatcaatctttggtgatgattacgatacaccagatgggacgaacgtccgcgattacgtacacgttttagatttagcagacgcccacatcttggcctttgaataccttgctgatggtcatgacagcaacgcctttaacttgggttcatcaactggtttttcaaacatggaaattgtcgaagctgctcgtaaagtaactggcaaagtgattccacttgaaatggcccctcgtcgtgccggcgatccaagtaccttgattgccgctagtaacaaagcccgcgaaacactcggctgggcacccaaatatgataatatggaagcaattattgaaaccgcatggaattggcatttaaaccatcctaacggttacgctgatcgctaaactaaattaaagcagttcaaaccctattgacggatttgaactgctttatttgttataataaaaatggaacttaaggaggttcatcatgtctttattcatcacaattttaacgagtttaatcgccatcgaacatctcggcattatgggactcgaaatgttcgctaacgatcaaacaaaagccaaggccttcgatatgcccctggatttcgttcggttgcccaacaccaaagtcgcccttgctaatcagggaatttataatgggatgcttggtgtcttaatcatcgccgtcaattgcttattgaccggtgccgcattaaaaaccgtcttagcattattaatgttatacatcttcatcgttgccctttatggcacttttaccgcaacgaaaaagattttcttcttacaaggcttaccagcgctgattacattgttactaattttaatcttttaaaaaaggagttttcataatgactaatcaaattttaattaccacgaccgaaagtattcctggcaagcactacgaagtgctcggtgaagttttcggtctcacaacccaatctaagaatgttttcaaaaatatcggtgcctcacttaaaaacgtggttggtggcgaaattagagcctataccgaaatgatgaccgaattgcgcgatgtcgcaatcgaccgtttacgccaaaacgctattgagatgggtgctgatgctgttgtgatgatgcgctttgactctggttcaattggaacggacatgcaatcagtcgctgcctacgggacagccgttaaatatatcgactaattaaaaagcctcgtaattgatttaacaaccaattacgaggcttttttagttatactgctggtacttcaggctgcgtattatttaatgtccaagtgatatcactagagaaattttcaccaacttcaatttgaagatctggattggcagccatcaataagttacccgttacttgccaagcgtttgataacttggtcgatgcaatcgttgtttcactattattatcaaccaatcctaaattagctcctcctggtaggccactcatattaaccgtcgttgtattcaatcgatgaccagctttagatgccattttagtcatctttgccgttagtttccaacccggattaactctagtatcggtaatttttaacgtgtcattaacttcatacggctgattctgagtgtttgttcccgtataaacatcctttgctaaaacattgccaaatctaaagttaggcacttgatccaatgttaacttacctaatgagggatcaacttgtagttcggccttattagagacaacgacgaccttttctgctttcttacttgattcttcttcagaatcaacactcgtcgttagtgttagctgtgcttgatagcgcttaccgatagcagtcgcggctgcggcctgtttcataaacagactatctttagcaaacgttaacggttgtgccgtatttaagttagccagattattaatatcaccgctactatttgtcacgccactatttgctggcaactcaatcgttttaccagtactatccataaaatgccatgcataatgccaagcactcgttgcgccggttgctttaactaattcactcaagccgcccacagaccaactaccaccggcatccattgcccgattataggctggcaggccaccaacataaacatccttattagccgctacattaccagctgcaatcttaaagttagcaggaattcccggtacattaggatcacgattgacttgattgacgtaataagaatctggtacatattgtttgtcgctacccacttcaccattaccggccattaaagatgtttttcgaccattacttggtgtaaatttcaagagatctttagcgctggctgcttgccaagtaatatcatcggtcgaatcgactggatcaataatcgctctagcaccataatcaacatccgaatagatgactttaggtgtaccgtcagcattatccgtatcggcattaatcgatttagccggtttcggttctggcgtaatccccactttcgctaaatcagaatagaaagtcttattaagaggccagataccatctgaaaaactaaattgataatagtatgtcccgacacctaagttgcccgacttatttaaagcatagtcattaatatctaaaaagcccaaagagcccatgatcaaagacaaaccggtctttgctttaggttgctttttatcttcaacccaattgttctgactagcatcccagtgccaacgccgaacagtaatgtcttttcctaacccattacctaagttcgttaggatactcatccctgagaatttagccttatcaatatcttgcagcgcaaaataatcttcttcttgcggctgacggctaaaccctcttctaaaaattgttaataaaaagctccatccgtcttttgaaggtttatctgcattactaggtgttccaactggttcagcactgcgactagttggtgcttgctcactcgtagctggcttttttgtattgccatcgattgattctgttgatgtttctttttcggtttcactcacactggttgctgactctgattcagccgcccaagcctgacccggcacattaatcaaactaccactgagcatcattgccaccaagctcacgtaaattaggtgcttaatttgcatcgtagtccgcccccttagtattagattgttggcgatgccagccaagtaccaatagaattatcgcactaccgattaaacttaatagtgtactttttatagcacccgtttgtggtaaacgaccagtggcattttgggaaccactcgctgtgtaatgaatttcttggccattttccggtattgttggctgtgcaacaccactatcctgaccatgattctcgggtggcgttggtcttttttgatcaatatgcaccgcaaaactagcggtactttgtccactatcaatccgattagcttgtactggttgcgctaccgttaccaataagagtatcagtaacaacaatcccatcattaagccttctttacgtcctgataaactactcgtcatgttcccctacacccctttttcgaccaattaaataggcgactaatgctatcactaataataataatatccctagagaaccccataaccaccaatttatccctggtttttctggatcaattagcgttttgttaacttgttcccgtgtcgcaccatcaaccgtaaaatgttgttttaaattaaaggttttcttacccgataccattttgacatgataggtatagtgacctttgggcaaaattttattattcgtctcaattgcatagttaaatgttgagcgcggtgccattgataatttttccgcgttcttccgatatatttttttagtttgattctttttggtaatccaagcatgcatcttaatttgaccaaacattgtcggttcatgattagcgatttgaccaacaacttgcggcaccccactggatgaatccatcttagtcttcgttaaggttaatcgaggtgtgattttctgatcaaaatcctgtgtcacaacgattggaacagtcatcgcaaaactatttttaatgccgaaccccttcttttgtggttcgttattcgacgttcgtttcacataaacactaccaagaatcgttcctttaaaaccattttggggtattttaacgttaaaagtgactttttttgaagcacctggcgctaatgttaaactttgtttgcgggcctcttttgagaccaaatcaggtaacaatggcgcttttgttttgaccattttttgatgcgtcggtgtatagtcaatactgccgctatttgacgttgaggcggctacaagctgtgcattgaaatcatttgttttcttcgtatttaaattttgcacgttgacggtaattggatatgtttgccccttttcggctttaattgcgaaataacccaaactagcatccgtttgtcctaacccatattcaggtgttacggtaaattcagcaccttcagcatgcaccgcttgcgcaaaactaccaatccccaccaataaacatattaaacctaacattgtgattaatactttctttttaaacaacttcgtagcctcctataaaaataaggggtggacaaatcactttgcctgccccttatccaacacatcattcacttgattgacgatgacgatcactagcgccaatgactcattatttctagattaagcttctggtgcaactggggctgttgatgataagttccagttaattgttgttgagaaagcttcatcttttgctaaatcagcagctgggttagctgccattgtcaatttactatcggcagctgccatgttgaatgtatcaacaccatgggcaccgttacctttgacaacttcaactgcacttgcatcatctttaatagcagttgctaaatcttcacctaatgaaccagtagaagctaagttcaacgttgaaccatttaattggttatctttatcggcaaattgacccatatcagctgttaatgtccagtctgatgcacctaaacgtgtatcagatacttctaaagtaccgtctgcttgtgcttttttaccattaaacccagcataaatatcactagcttcaattgtaccgaagttaaaacttggtactgattttaaaaccaaagtaccgttttcaggatctgttgggttagttggatctttagcaacaaccgtaaagtctgcttttgatgtttgtggtgttaccgcatcagctgatgctgaaccgattgtcattgcggctggtgccaccaatgctgctactgctactactgagaataatttagtcttcataagataattcctccaaatattaataattaattacattcaatatagtagcacgtaatctatcttctaaatgacaaaaaagggataccaaatggtatcccttttttgttgatttatctttttttgaaactcatctataattttgcagtttatttggcaatcaccaatcttcttgtatacaccgcttgacccgaatgcatcactgcgtcatcaataatcaaaactaaccgcgcaccgcgtgtcactgccggcgtccaattatcatcaatcacttcatctagactttccagagaaacatcttggagataagtttgtgttaacttaacagcttctgccaagtaatcgattagaagttggcgatcagagacgactaccttggcagcctcttcggggctatgctgccaatcttgcgtatcatctggtaacgctaacccaaaacggcctgtccaattagcactgagccacaatggtgtttgtccctttaaatctgaaatctgatagtctaattcccgtgccgtatgccaaatgagccatgttactgatttgataagtggattaggcatcgtattagcctcctccagtgtcatctgttctaaagcttctaacagacgttcttgggcgcgagccaccgtttcaatcgataattgcattgcttccatcatagtttcctccaaattcactaagctgtggtcattatagcatgcctgctccagcaataccggcatcaaccatcgtcgcctattctcgcagcaccacttttttgatatactactttgtaatgtcaacacatcaaaggagtatccgcatgtcatcagcacaacaaattatcctattatttatcgtcttctgttcagcagttgccgttcttggctcatccgtaatgagtttcatcgccttttataaacataacgcgaccctcagaaaaagcgccagcgtcactttctggatcagcatcattatcctcgttatctttctaaaactaattgatatgtatcaataacaaaaaggcctccgatcatgatcggaggccttttgctatttatttaccttttttatcttcttcattcatcttcaaaatggacatgaaggcttcttgtggcacttccacagagcccacggatttcatccgtttcttcccagccttttgcttctctaacaatttccgtttccgggtgatgtcgccaccgtaacacttggcaagcacgtttttccggaaagctttaacggttgatcgagcaataatcttattcccgatagcggcttggattggcacttcgaattgttgacgcggaatcgtttctttcaacttaccaacaatcacacggctccgttcaaaggcaaagtcccgatgcacgatgaaactcaaggcatcaaccgcttcaccattcaagagaatatcaatcttaaccaggtcactggcacgatagcctgtcacttcgtaatcaaacgatgcgtaacccttggtgtttgatttcaaatcatcgaagaaatcaaaaatgatttcagaaagtggcatgttgtagatcacattaacccggtacgtgtctaaataatccatcgtcacgaattcgccccgtttacgttgggctaattccatcacagccccaacataatcgttagggaccatgattgacgctttgacgtatggttctttaacttctgaaatatttgatgtttctggcatttctgatgggttatcaatcacttcttcagtcccatcagtcaaggcaacgtggtaatcaaccgatggtgctgtcatgatcaagtctaaattaaattcacgttccaatcgttcttgaacaacatccatgtgtaacagacccaagaaaccacaccggaacccaaagcctaaagcttgcgatgattctggttcgaactctaaagccgcatcgtttaattgtaatttctcaagcgcttcacgtaaatcattaaacttcgcattatcaacgggatacatccctgaataaaccattggttggatatgacgataaccatcaagtggtgcatcagctggattatcagctaaagtgaccgtatccccaacgcgtgtatcttgaattgttttgatgctagctgtgatataaccaacatcaccgaccattaagaaatcacgtttaaccgctttgggtgacatcacaccaacttctgtgacttcaaattctttaccgctgttcattaaacgaatcttgtcgccgactttaaccgttccatcgaccactcgaatatttaaaacaaccccgcggtaactatcgtaatttgaatcaaaaattaaggctttaagtggcgcttctaaatcaccagttggggctggtacatccgtcactagtttttcaagaatttcttcaatcccaatcccacttttggcactagcaagaacggcttctgacgcatctaacccaatcatttcttcaatttcagccttaacaacatcaggttgcgctgatgggaggtcaattttattaataaccggtacgatttcaagatcatcgtcgactgctaaataaacgttggccaatgtttgggcttcaacgccttgcgctgcatcaacaactaataaggccccttcgcaggccgccaaacttcgtgacacttcatatgaaaaatcgacatgccctggcgtatcgattaaatggaaaatataagtttcgccatctttagcatggtagtgcaattccaccgcgttcaacttgatggtaatcccacgttcacgttctaattccatgtcatctaagacttgcgcttgcatatcgcgcttggcaatagtatccgtcatctcaagaattcgatcagctaatgttgatttaccatgatcaatatgcgcgatgatcgaaaagttacgaatgtgtttttgccggtctaacatttctgcgtaatccatttattgtacctacttcctctgactatcccttaaattataccaagcatgacacttaaaagcgaacagtattccttaaaatgacgccactaaaaaagacgaccacttaaaattaatttagtgagcgtctttagcaactatttttctggattcgttttagctttttgtttatctttttttgcttcttcttgcgatttatcgtgggtcacttcttcgacgaccttcttaactgtgccttcaatctgatctttaagactatctaatcgttcttcatttgccatcgtttctttcccctttcactattctaacttcattttacgagtcttcagtagataatgtcaaaaagaaggccttttttcgtaatcatggtatacttagattggattcattttgatttttaaattaagaattggagtgtggtaccatgacatttttaatgactttttcaaataacgagaccgttactttaccggaaacagcacgtttccacgcttggaaaaacgatacaagttatctgagcgtggatgaagaccaagccttctatttagaagcaattttctcaggaagctatcaagaagctttacaatcagctaaagccaatcaacaaactgatagccaacccgttaatgtcctcgccggattattagccagtgccgattggttaacgctcgacgaacatccagataaatactaccgtactagcacaattgtttcattagaagtacaatcaaattaaaacacaagccttagtctgatgactgaggcttttttagtggttgattgcgttcaaatcaagcccgttatacaattaactaaatcatttgctttggaggctaattaatgacaatcttattgacgattcttttaaccatcagtatcatcaccagcgtttattatttcacgaaacacccttatcatcgtcgcttctggttgagcctggtgtttttgcttgtggcaatcattggcctaggcaccactaatacacttattaactcggcgagtgcttcaaaaacaaaggttcagcacgtttcgaaaaaagaaggccaacgggccaaacaagaagcactcgccaactcaacctcacttaaaaaacaactagcggccaaaaaatcagaggctagtagtctatcaattgcggtttctgaacaagaagcggctactgaaagtaatgtgcaatcgaccgccacagtcgatacaacccaaacaaccgctaatcaagctgaagaaatggtgacagtggcacccaacgccggtaaaaaataccatctcgatgcaaactgtcgcggcctaaaacgcgccacgagtacaacaaccatgactctggccgaggcacaagcgcaaggctatacgctttgtggctgggaggattaatatgtcaaaattaaaagcaaccaccactctcattatcgggttactccttgcaagcagccccctcatcacgccgaagccgatccaagcagcttcagggactgcggattatcaacaagcacaaaaaattaatcagaagaataaaaagaccggcaagaaaatcagtaaattacaacgtcagattaacaagctcaataagcaactcgctaaactggcaactgaaaccaatacccccatcgctaatacaacaaatcacgctgcttctgagctggcaacattagattatcaaggtgataatgaaattatcgtcaacaataaccagcctacctttacaacggctgatctcgccactacaaatggaccctggcagacttttagtaacctcgaccaattaaatcgggccggcactgccaatgcactcttaaataaaagtatgatgcccactgccaaacgggaaggccttacttggaacccaactggctggcgtaacaaacgggtgaaatccagttggctctataatcgtagtcatttaatcggttatcaactgactggtgaaaacaacaaccctaaaaacctcatcaccggtacccgccaattgaatgcccccgaaatgttggctcatgagtcggatattgcagcctatcttaaaaagcatccctcaagtgacgtgcgttatcgcgtaacacccatttttagagggaatgaactactggctcgtggggttcaaatggaaggtcagtcaattggcgataatagcattcaatttaacacttatatcttcaacgttgcagatggtgttactttaaattacgcagacggttcaagtaaaactgccgaataagcacattaagcaaagccttttgggactttgcttttttatattgtctaacagaattgtcacccagaatttaatgcttatcatcaaacttaaaacgtgagataatatacccattaaatcttttaggggagttaccttatgcaaacaaaatcacatcagatactgaataattttgatatcaagattctaggaatattactcatgtttgttgaccatatccaccagatgttcgccggagcaggcgtccctgactgggtcgattggttcggtagaccagtcgctactattttctttttcatggcggttgaaggtttcacgcacacacgtaaccaaaaacgctatctaactcagctgctcatcggcttttgggtgatgaattttggtgatcgactcattcagcaattcttcacagttggtgatatcgctttatccaataacatcttcacagatttatttattgccgtcctagcaatgtatgggatccaagaaatcacagctggtcgtcgggcccataataccaagcaaatgataattgggtttttagctattatcgtgccaatcatgatgtcggtactcgttatcttgttactagttaatcccaaaacagcaatgttagcagcaaatatcggcatggttattccaaccatcacacttgctgaaaattctatttttctttatatcggtgtcttcttttaccttttccgcaataatcggttactgcaatgcctgacaattattgtttttgccgttattaacgcaggcgctaactcaggttttacctttactggtttattaacgactaatacccaatggatgatgatttttgcgattattccgatcctgttgtacaacggtcaaaaaggtcggagtatgaagtcgtttttctacttcttctacccaatccacatttggttattatacattctcgcttcattcatcatttaataccgcttaataagctaaaaactgttaattagtaaacgcaatatgccataatattattaacagcaaagcgtttttcttatcgtttaaaaacgttaagcgctgattaatggaaaggggcttttatcatggtaaaatcatatcaaagatattgggcacgtattcttgatttcacggggacctcaaatcgtcccgatttttggtggccaattattattaattatattttaggtggcattattattggaattattcaggcaatgaccgggcatccaatctcagaaatttataacattggtgatttaggcatttcgatgggccgtaatatcgtagttttcattgtatggatcgcaactttatccgttaaaatccgtcgtctgcacgatacagaccgctcaggttggtgggttctcattgaattcgtaccactgatcgggacaatctggttctacatcttaatgctcctaccaacaaaaacaaatcgttgggcataagcaattgatttaacagtcacactggtggctgttatttttttgcaacaaaaaaggcatctaacaccgttacggtagtgttaaatgccttttattaagccaactaattggcttaacccatgttttatccaatggagccggcgtccatagacgatacctttacatcagtggtttaaacacacgaagtgtgcaaaaggtgtgcaattgattacataaacacaaaaaaacaagcctaacccacaattttagtgagttaggcttgttaagcaaataaaaaagccacatagtgacctttttacaacgaagttgaggtgcctcgcactgactattttaatagctctaattcgtttatcaggattaccctgtacaataattctaacacatattattattttagcaatcttttgtttcccatttagtaggtaattttagcggtgctgccacacctttcttattcaaaaacgattttaacacaggaaacttcccgttgtgatagccgtacttagaatttgccaatatatcgcatagctgaattgaggggcttattttagaatctttaaagcgagctttatacggcacagatgatttcacataagattccgtaaaatattgattatgcatactcttattaagataacgttccagagaatcgtaactgttaagctttgtttgggattggttatcgatgataataacaacttcatcaactaaaattttaggaaagtattttctcttttctaaaattactttttctaccaatcttcgaattaaataattcttatgtagctggacagcttgtttgctttcaaaatcaatggtcatttgaggaacgtaaatcgattcaaaaactggattaaaatcttctgggaatttttttaacattctatttataatctgtttttttatgccaattgacatatcactagcttttatttctaagttcgttccaaatatttgtctgtgcaaaactctataataacgttcaacttgatttaaattactcgacagcgtccagtacccaccatatacaaaaaagtcactatgaggatagtttggatttaattgaccggaatcatcaataaaaatatgcaatgttgtcatttttttaaccgcctaaattgtattacctgaattatacaatagtattcaagattatccaaacaagagtttatgtacgccctcaaacgagggcttattttattgcttacgttatttaaatgttccccatgcaatgccgcttggccactcgcgtactggcaagtaaatatgttggtttccatacatgtgatggatccatgtatagttaccaactttcgcccatgagtcgtagacccattcgccgttaggtggtaagtagccaccttgctgtgcgcttgtgcttggtgcaccgacacggttcatgatttcagtatcaccgttaacgaatgtacccttttcaggggtgaaacctgatggaatattgcttgctgctggctttggagctggcgctacaggttgtgttggagtcgatgctgaaccaccattagctaagcgtactacttcatcaacgtctaacccgccagggcatgctgtggctgtcacttcattatgagctaacacatgctgacggtcgcaaggaataccataataatcgcagatatctcgcactaatttagctgtgtttgccactgttctagggccaaccgaccaactaggtgcgccagtagaattgacgttctcaataccaattgaacgttcgttagggttactcatcttaggtacgtcgctgccgcctgtaccgccacagtgataagctgcatatgtttcttcaacgcaaccaataatctcggttggagtaacttcatagtgcgccgaagtccaattacctgaactagtataccatgtgctcatagccacattcttgttgattgtcgcgttatgatggataacaattcggtcaatacccacaccattacgactgcccccatacattctatttgggttttcgcttgtaattaaactgctaaaacgtctcgccattattttgtaccccctagaatagatttaattgcatcataaccaccagcacttactaatccagcaatcgcgccaccaagtccagcgattaataatgtttcgaattgacccggcatcgcgtaaaatgcggcaatcccaataataaagccgactaccatatcaattaacggcaaccaacgattatcaatctttgtttgtttaatcccccatgttactaagccgactaatacggctaccattgcaatagcgcttgccattgctgcttgaataatttcaatcattttttgtcacccttcccgtgtggaaaatatttgtgtaattttgccaccatctcatcttgaaccaagttaaatagccacattgggaagtattttgaccaacctaatgcggctatattgcctaaaaatgaataaaagttttgccaaataaacgcgcccgtaaaaaaggcaaaaataaaagactcagtctcgaagacaaagtccaaaaaaattgagcatgcacatattgctacgataatgaaatctcgcattaaagcatcaataccagcatgactcgttctattttttaccggcgactgtctagccaaagtcgtacctgttaaccaatctagtatgaacaccagaattaaaattccaatcataacagcatggtcaatcgttggtgtgtcacttaacacccatgtggggattgcaatggacacaccgaccaagaagctatgatcgttcaccattttgtctaataatctttgcaaaccatgctatccctccttctattctttaaccaccgttgccttagctaacttagcccgcgcaatcgttgtaatgtccttcatagttaaattgtcgaacgtttgcccgtcggttaagtctttggctgtcacggtcatattggcgtttaagtaatcggccccgtcattaccggacaaactaacggtaatagatgtggtatttccgtccccgtcgaaattataagttaatgctgtctttttaatattcattattttgtttcctccattttattttcaaatgctgattctagttggtccattaataaatcatacgccgccgcatcttgattgctaaattcggttggatagtcagcgatgtcatcatagagagccttcattttttcgctgtattctgtaaaatcaatgaccgcagactcttcatcaatttctttaatagccgtgtttgcttcatctcgtttttcctgaatcagaacgactgaccccggagtgtcgccttctacatcattgccagcttcatctttcttgatgaacggttcaagcgcatccttacgctcttcgttatattcgtcattcttagccgagattaacttaattaatttagtgcgaccgcgactcgccttatttttaagacttaacgttcccaagaaattaccgattgctgctagttcttcatttttaaatgcaagtgtttttgtcatgctgttttttcctccaattgttgttttaatatttcaacttcattttttaatttagcaattactggaattaatgctggcccaattcggtcataattaatcccttctaattcaccatctgtcccacgaacaaccaacatttcaaggccagcatctgcaaggtcttcggcaatcatgccaaagttgcgtgttggtttaggttgtgtagccgggttgtcttggtaacgtttagtctcggcaatgtctatccatgttgcggttggcagatttaacagcttatccccatagtccgtggcgttcgtccggataatatccgttttgtacttcgacgctgaggttgaccgtactagcgctccatctcgggcaactatcacgtttgcagagccactggctgttttaacataggtaggtaagctatgaacgtattctccaacgagttctattcgattgctattccaaccttgtgaaccatctgaaccaatacaaatcgaagctgaaccgccaacccaagaaatagcagatgagagcttctttcctgctgaaagaataatcccccggtccgcaccgccaattttagttggatgccaactagtcccgtcataacctgcactgatacccgcaaaagattccgcgcctcctaatggactgtcaaaaatattactagaatttgcgttattagccatcactacataatctcggccaactattctagccccactaaacgctaaaccactaccaccattggatatgctcaaatacggatttgtcgtctcatcaaaaattgttggttgcacgaattgaataccaccatttttaagcaagacgcgagtattaccgttggccactgataaatatccctgatcaatattcacatcgacattgttgcttgccgaatgaatccggccgtgttgaaatacaacctccccagtattcaaattcatgcttaaattagcgcccttaatagtccccgtcgtgatgttattagcattcaggttaatcacattcacgttagcggcattaagcgtgccagctgtaatcttatcggctttgacgtttgcaatcatcgcatctttaataactgcgttgtcaattgacgtctgtcccgtaatatggaccttttgaccggcaatcaaaattccttccgtagaaacattaatttgattgacgatatgctctttctcaactcttaggtttatttgatctttaagttgagttatttgcgatccagtcacaccatctggtcgatatggtcccaatttttcagccttagtcaacataggttgactaaatgttacccaagcatacttgtggataacgaagctgaataatagcttcactgctccttctggcgttttcatgccttcaaatttggctctttgccaaatttgaatcttcttactatcaaaggttgcctgctttgcaccaatgaccttattatttttatcaaagaattgtaattcgacaaaagcagaaatatccggtgcgcccatcacaaaggccatcgctccaaaactccacacatcgttcacaccaatatatgatgggtctatccactgacggaatgcagtccagtctcctactgtagtccctgctgtgtttgccgcaagcattgtaataccataggaaccattgtatccgccccactggccatcacttctgtaaatagaagcgttgttagctttcccattgttgtaccatcctgttacttcattgggaagtacaatgttagcatttttatctaattgatccatatcggaatttgctacaaagtttaactgaccagcatctgtaacactgctagtaatctggtcagccagctgtgttacctgagacttatctgctttattggcaacagttgtcttcacgccgcttaaatcaacttcgattttagaaacggcctcaacagtagcattatcctctggtgcttcagtccaatcagtcgctttgttaccgagctcaatctttggttttgtaactgttgagtttggtgttgcagattggttatacagccataaatcatataaatcgtttgttggagatagttttggcatattaaataaagcgtaaattgtgccatggaagctttctccagcactagcggtcttccaaactttagcgtaataagtttttccatcagcgccttggaattttgtttccataccatatctattattttgccccagaacatgattatcaaagtcaatacggcatgatagagcaattgatttttcaccaaaatatacaattgattcagcaagatacatacgagtctgcgtattcatattagcggtatacgttccagatttaaggatatagttacgcccgccaatcgcaagattatccagattattctgaacctttgacacgctcagatttatcgaatcagcagtggacttaatctgactttgagtccatgtttgagtggcatagccatttaacttagacgttagttcagtcttagagacggtttgcgcaatctgtccggcttgtattttctgttctgcgtccagatttttaacagtcccattaagcgaatcaaccgtactttggctagcttttaacttgatttctttgctgtttaaatcaatagcagtggtgttattagtgacggtttgctcaaccgtgttaaccagcgataaatcagctttaagttgtattgccgccttgttttgattgataagcgtaccttgacttgtgacgctaccttttaacgtgtcaaacgtcgtctggttaaccttttgtgcaagctgaccattaatattagtaacttcggttttaaccgtttgatctaatttggcaacattatctaaggcgtttttagcattagttaaagctgtgccagcgttagttaaagcatcttttgcctgttgaccagcttcggccgcatccgatttagcttgattagcggtcttgtcgacgtcgataacttgctgctttgcaaaacccgcatctgttacggcctgattagccttacccactgcatcatcggcttgcttcttagcttcaccggcttcttccatcgcattatcgacgttttgacggacttcttcgcctgttgcgtcgtcaacgattaacttccagcctggcggaacagactttccgtcgtactgccagagttcagttttgtcgccgtttttcttgtaccaaaggtcaccgtcaactgggtgacttggttcggctgatccgtagtagttggagttcttaccgttagcagattcggcaacagtgttcaaatcattattgatgttgttcaaatcattgttaatgttactaagcttattatttgtttcggtattagtgtcagagaatgatggtacatagttcccaagctcaacctctttataagcttgcgttattgcatcgtacttataactaatcattcgcgacttaatgtccaagttgtctgcaataacagtcacatagtcccaaggttcaactttttcaagtgctttaaagtctgcatattctttcgtgtcagccaaattatcgaatgtaactttaaaattagacgtcgggatatcaaccttattcacactatattcaagtgctgctgcctgtcgaagtaactcataggcttcttctaatggcaccgaactttcatcattggaagaagcgtccggatcaattgctttaatgtcggtgtactcaatttttttaatccgtgtaaacgcatacttgtcacgtagcggactatccacatacttttcgggtaacatcaatccattgtagccgtacggcatgattcgtgtgaccactgttgaatgatctatgtttgcctcgtagccggttaaattcttgccatgacgaatcttgaagcctttatcattgccgcggacatcattcatataaactgtgaagttatcccgcttaatttcgccaccccagcgcgataggaagctgttatcttgtgacgagtctagtaaggcttggatggcattcaaacgcaccatacgcgcgctattagttcctgcgatattcgaaacaaacttgaatcgtgtagcgtattgcaatcctgctccaaaatgtgtaatagccgcctgaccggattgtctgacgatattaatatcctcgataaagttgcctgccaagtcgtaaaagatgtggtagcaatttacctcgaggaaaccaatatttttagtgaccttataaacacgaaacagctggtcaccatctggtgttggcactttaataatcatgtcgccttctagttggctagcatgttttcctttggacaagtaggcgaaatcaaagttatagatgccgttcattttttcttcgacaacattttctttaattgcaggatctagaacgcccaaaccgttgctatcgaagtttgtttcatccttgttaaatagacgaatcataagtagcggcacctcctttgaatttcaacaccggttattccaccatcgaacgtgatttttgttttaccaggtggcagcttcggaaactcaccagtcattaagctacccaagttggtagtggtgtaataagcctcttgaatttctgaatccattagcatgtattccttttgtaggtcaacagccaccttcgtagaaccgactgtcaaagtacctttgccggatccgtaaagttttaatagcggggtcgattcaaacgtaccaatgttttcaacctcaccaccactggcgactttaatcattgaatcgttacgagcgtattcgaatgggtcgcagctaaatgtgacggtaaaatcaccgtattcagcaatgtcatttttgattccactaattttgacacgcttaatttttcgataaacgtcgtcatcggtaaaataaaaagacttagcacttaatagccaagccttaatctttctgatctgcggtttaatattgaattcttcaaggatattaaattcaatctcttgttcaacgtctttataatatttgaatctattgacactgccgtgacgaccgtcaacataatcagtttcgtactcggcttcaggcgcttcaatatcagaccggtcgacaatgcttagcagcatatctgaatcggattttgaatcaattacaattcctgtcactatacattcccccttacgccataattatttctagcgcctttattagccaaccattgatctgttttttcaaacattgcatttgtatcgtaatcactggtaatttgattattaaatgtgatgttaaaagtgtttgtactacgactatcagcaatcgcactaggttcaatattagcgcttttaaaaattgcatctccaatcgttccgagcaccgatttagtaagtggtaacgccgcttccggaccagcttctcctaaaccgttcgctccaccagatgccggaaacaatgtaggcttattaaaaaccccgccttttgcgtaccattttacacttagatgcggtatcgaaggcggattcagactaaatttaccttttatatgaaaatgtggcattggtggcatgttgattttaggcagtgacaaatgaatgccactaaaaaagcctttaatcttactgataattccggaaatcgtgttagctgcagcgtgaattggagtggtcatcgctgatttaacaccgttccaaactgatgaagtaactgactttattccattccaaacgctagatactcttgacttaattccgccaacaacgtttgaaatcacggatttaacgccattccaaatgctagaagtaactgacttaacaccattccatgcacttgaagttacggatttaactgcattccaaacgctggtaacttttgattttacagcatttacaacactgctgataacagattttatcccattccaaactgaactagttaccgatttaatcccattccaaacgccggagattgtacttttaactccattagcagccgatgaggcaacacctttaattccgttccaaacgccggagataacacccttgattgcattccagatggaactagttaccgatttaatcccattccaaacactagaaacaacgcttttaacaccatttatcgctgatgataccccacttttaattccgctccaaacattgaaaattgtggacttgataccgttccatacgttgcttgtaacgttcttaatggcattccaaatatttgaaacgttgttcttaacattatttacgtaattggagacaccactaacaataccattccatacgttgctaataacacttttaatcccattccacaagttggatgtaatattcttaatgccattccatacgtttgacacaacattactaatatttgtaaaaatattagtggcactttgaacgagtccgtcccacaaaccagagagaaatgtaataaggccattccaggcacctgttgtaacgtttacgataccttgccatagtccgctaaaaaagtcagtgattgatgaccaaatattctttagtccatcaacagctgactgccacgtttctttgaccccatcccaaatattagaagcaccctcggtaatgcctttccacaagtcactaaaaaatcccgtaaaacttgaccaaccatctttcaacgaatcaacggttgatccccacgcctctttaacactatcccagattccagaagcgccttgtttgattccgtcccacaaactggaaaagaattcggcaatcggttcccaaacgccttttagccaatctacaatagcaccccaattcttgattgctaaaattactcctgcaatcgccaaccctatcgctgcaataattaacgttatcggactaaagataattccgatagcagtaccaactgcggccgcgatgggagctaatatcgtaagtgccgtcatgattccaccgattactacaatgaatttctttgctggttcgggcagcccttcaaatgccttcgctattttagcgaccatgtctaaaagcggctgtaaagtatctttgattgtatcgccaatcggcaataaagcatccttcattttttgtaaagacgcttgccattgattgttatcttgagcttttttgtttagcttatcagctgaaccagcagtcttatcgaacgcgccgctcgtcttaaataaagactgcataaccttattaccattatcttcggctaacgttccccaaattgtgctttccgcttcggccttcttggtctcgttgggcaaagttccaatcttcttttgtataagctccatgatttcagcgttagactttccgccctttttagctttgtcatacatagaaacccaatcgccacccattgattcgagacctttgcgagctgttccatcgtttattctaatgcccatttctttaatgacatcgttgaccttatctgcgttatacgcaccactttcaagcccattttttaacatcccgaaatagtcttgggcactaatgccgttctgtttcatcaacggcgcgtattcagctaggttatcgccaagttcgtgagacttatccagtccttgttcggtaccggcggtgattaggtccatcgccgccttgccatccatgccgtaagtctgcatcaaagaattggcaccgcgcatcgtttcatccatatcggaatcgaagatcttgtttaagttcatggctgattgcgtaaccgaatttaaatccttttcatccaaatcacccatttgattagtgacaattgacaccgcttcgccgacgtcttcgaaatttccaatacccgtttctgaaatgtcccgaatgtgctgtttagcatcatccatcgataagcccattgtttgagcgccatttgcaactttgaaactagcatcagacatctcactagacatgttaatagcttccccgccaatgtccttaactttttcgccaagttcaccgatagcgtctgcggcttccatcaagttgccggtatctattttcttgccgatatcatctaagttggtggtatcgacttgcttagcttcattgccaagttcagccatagctgtttccgcatctgctaacttagttttcatttgtatagcttcagttgaagtcgaaccaaattcttgttccgttcgggccaacgcctgcttcaatagatcaacctgcgcagctgcgagttttgattgctcaccgacgtaatcttgagccttagcaagtttttgcgcgtcggtggcggtttggccagcagttgcctgccactttttaaattcggcggtgctagcagcttgttcagctgacagtttcttttgcgcctgttcaattgaattcatagcaccgttgtaagatgatgtatcacctttagcagccgataaagcttcactagtttctttgatccgattacttagttgctgttggtaaatttgtgccgatcttaattgcttttcgtacttattcgcttcgtttgaattttcaccgaaatacttttgagcgttagataattgctgcccgagagtttgaactgcacgtgtttgagtctcatattgagcctttaaactatttaaattagcgcctaacttatcggtgtcagaaccattttgtttcatctgttcttgctcgagttttaactcttgacggagcttggtaccttcacttttgatgttgttaaattctttttttaatccatcgtcaataactttgaattcaatttctgcctgagtttttttaccagccatttattttatctccttccctatttttgtttttcgatttcttcctgttccttttcagctttccatccctcgaatgattgcttattagtggcaatcgtcagtagttgaccaactgaaaaggattctatttcgttttcagacatagaaaaaacgagcctgaaaaagctataaacatcttcagcgctcgtcatttttagtttcgggagcttgaagctccctgatgtttttttgtagtcttaaacgatttttgaaagtccccttgtttggattgaccacttaataattcagcgtaaatttttagtgcatcagtttgattctggttccacgtatctaagaaggtttcccaagagatataatcgttcatgttggcttgccgataagcaacataagttgctttgattgcggtaataagatttatatcttgcccaccattttggttgaatgaaactgtcacaacctcatcagtgttgaaatcccgattaatgagcattaattttttgatatttaactttgtatccacgttagcgcgtttaccgtcttcaaaagtaatttgcataatagtaacctccggttttaatcgtctcagctcggcccgtggcctactcgtctctgtttcaatttagtctattccgtaatcgtgatagtacattcggcggtaaaaccaccgtcattggttgtgaacttggctttcgcaccccctgctgttataccggttactttgccggatgaatcaacggtggccacagcggctttatcgactgtccacttacctgttttatcagtagcgtctgcgggagtaacagacgggattaatgtttcagtagccccgattttaaggcttagcgtagttttgtttaaactaactcccgttacactttttttgctgttgccgtcaaagtttcagcatttaatttcgtcatccaagcatcttcaagcttaggatcttcaagttcagtaacgattgcttcatggtagaattcgcctaaactatcgaccatgacactagcttcaagttcaagtgctgcgacttcatcggcaccattttcaatttcaaaagtcaatccagttgaactagaaacatttagcattgcttcaagcttggcattatcttcgaattcatcgactaccttagcagccaatgcaaattgctgccccttagacgttggaccgtatgagtaaatccccggtttaactttttcgttatggtgcaatccatagaacttacgataaattgcaagcggaatgtgggccgtaatcttagccgtcattttaataggcttagaaatcttcttaacttcagttgagccacacttcttaacaatttcttgcatttccgtttcggcagagaacttaccaacgcagtctgccaggatagctgcttcttcatctttaaatagaaatgacaacgccgcaatagagacgttatcaaacgtttgtacaatgactgtatttgccatcttgttgcctcatttcattattattttttcaacagcatctaaaagctgttgatgaatctttgggacgcttcggtttaaaccttggtttagaaattcttgtgccgactttttcgcagatgtaccgatacctaagtcgggatatttcaaatattcgtatttggctttagggcgaattttaaagcttaaattgccgtagataactttataagcatcagctccgcgggcatgcttgtgtcctcttctaagttgtcctttagacaccggtgtccttttatcaatttgctcaagggctgtcttaccggactcagactttagtgcctcgttaatggcagactccgacttgtccggaatctgctcaatctttttgagtaaaccgtccattccggttaaatcaacactccagttagcagccaatcttaatcacccgcttgcattcaaagacaacgatgtctgcatacaagtcttgtttgtcaatttgactgtggtctttttcgaccgcgataactgagtaattagccgacttgatcagcttgattaggtcgagtacatcgccatcaataaaagggcgttcaacagacacgaatgttacgaaaacggtctgcatcatcgtgtaattcaggtcggagccttccggattactgaaatcaccagtagaataaattaggtatttcatcccacttgcgttctgctcatcttcagataacgcgtcagcatagacatcaatgtctttgtcaaactcatcaagtttcgtcactaatatctcgttcatcttgttcagacgttgcttcgcgtccatcactaccaatcctttcgagataaaaatagcagtagtaagcatcataatccgtatagattatgttgtacttatcactgcctaattttatgaagtatttgtttttgagttcttttttgatgatcgggtgaaacatggttttgacctttatcgagactttagatgcgatagtttcacctagcgcgtagctatctgaatcacgcatcatcattttacggaagtgcaatctagcgactatcttttcttccgagccgatacgaacccgtgaagcatttcgtaacacggtttgttttacgagttcaaacggtgcaccgtcgttaaaagtttctctaatcctctccatcaggttcagcctccaccgctttagtcataatcaaagcgaatatttcacgcttaaagttgacttcaaaatcatcaagggcattattccaatcgtaacggacgcgttccaaaaggagttcaagttctgccgaatcgtcagtgaagtctaaagtggcccctgtaatagtttcaaaatatttaagtgagcgtttaatcttatgttggatcagtttatcatcatctccccaatcaattcttaagttcatttttacaatcttaagaatatccgcgaatcgttcgtcagtcatggccatacacctctatttagttgatctcttagcggtttgtgtttctccacccttatcaggtggcgttacagcatcttttggcaagttgaagaccacaaatgaatcgtcagctttgggttgtccgttagcatattgcttagcaaggtagacccgttgatcttcgataaatttgtattcgtctgatgtttccatcttgagcgttgaaccaatccccatgaagtagtcacgtccgacgccaacaaccgatttgcctaaaggcaccgcaacagatgtgatgatgctgaaaggtaatggtaaccccgtgcggtaagagccatccatgatttgagtggtgattgctggataaattgttgcccagtaatcggttgggttaacaaccattaagatgtcttccggtttgatgttacggtagtacggtgtgtcgaccccttcgatgtgaagctcactgaattgccccattaatccaccaagcgttttagggctgaaatcggttaaatcaacggctgtctttggtgtatgtacaccacttttaacattcttgattgaacgcatcataccgattggttggtcttgtcccgcgccgtcaacgattgcttgttctagagcaatcttcaaggattccactaaaacagtgcggacatatttgtctaaccaagtagggcccaaatcaagcattgctttacatactggaatgtagccggataacttaaattgatgcatgttgattacatcaaagccgttatctaagacttgcttaatttcttcacacaatttgccccaccaagcaggattaacgccgcgactagtgataaattcagcaacgccagtgacgtttacaaattgaatcttacttagtaagtcatggctttgttctaagtcttcaaagacacgttcaaagattgttgcggggactaattcttctgttccagcaaagccaccgttattgattacttcgttatagtatttcgtttctttgttcgttaattgcgcttgtccgcggttcatcattactgccaagtcactactttggtcttttgccgctgccaaagtcgcagtttgaatgtcgttcgcaaagctggccattgcggtaccgaaagcctcttctgaaccatcgcggaaagctttcaataattcatcttgtgatgcatttgtttttaatttttgtaaagtcatttttgactcctcctatttttgggtcgtattaaaaaaggccttgaaaatgttttcaacgccctgttgcggatcgtctggattgtctggatcttttggttctggttctggttctttttcaggtttgtactgcttcttaatttcgtcgacaatgtcaaaaagctgttgcattaaatcatccaacgttttgccctcctctggttcttttggattgtctgggtcttctggttccttctgtgttggcacgtcatcaggcgcgttgcggaaaacatcaagcattttgcgagttgcgcaagctaccgccttgactggattgctaatttcatcgatgaagccatattctaaagcctcatcagcagtcatccacgtttcagcatccatcaactcaataagctttttctcatcaatcttcaaacctctagacaagtagctctgtgcgatggattttttcatactgtccaacgcttctgcaattttgcgtaagtcatcggatgttgcaacgtccatcaacatagttgaaggattgtgaatcataaaactcgcgttgtctgccattacaactttatcgcagctaaccgcgataaccgttgcgattgaagcacaaaggctgtcaatgtaggctatgctgggtactccataagatttaatgatattcccgattgcaattccttcttgcacgtcacccccaacagaattaatccttaacgtgatgttttcaggattggcagcatcaagcgtatctttaatgttttttgctgaaatgtccgcggcatcaacaacgccatagatgctaatttcaacatttgagccctcgtttttaaattctaatttgcttaggttgttcttttttgtcatctttatcacctcccttcgagtcttgattttcaatcattaattttgcttcttgataatttttcgtgacataacgtttgttagcccaatcttcatcgattggatcagtcccgaccttctcgctaacatcatttacagatacagcgccaatcgcaaacagcttatcaagcgccgtagccattgttgtgatgtcagtttccttaacgcttgtggtgtcggcttttacaaaacttccatctaaatattcgtccatttcaaataatttaagattaaactcatcgttaattagcgcgacgatcggatgaatgcaaaacatcaagaatgaatctatttggtcagatagaccggcaatatcgccttttaaaatacctttcggaatatgcatggctgcggccgttgtgtccaaaacatcatcgaataaatttttaatgtcacgactatctgcttttgtcgtatccgaaaagtctttgagttcaaagctatcttgcaaaaggtaagcggcaccggcattgtccgcttccataaatcctttaaattggtcagtcatcattttgttaactttactttgaccacttctatcttgcggagaaaacaagtcgccttttaatacataacgtcttgcattagttcgcttgtagttattgattgcagcagataggagcttcccataactagcatagtaagaattgattaatccgatcgttttagcatctgataacttcaaataaataacttcgtcttcatcaaatacacgatttaacgggtaaccatcaatttgaacgccagaaaacttactaggctttaaagctcggtcatcacacgcgaaatcgtcagcgataaacagctccgaatttgatgagctagggcttactattaaaacttcattgtcataaaagagtttacggattagttctttataaaactcgcttgagttctgtttgccgttagggcttacgtttaaccgataatacatctcgtttttaactctcttatttttctcataagttctaaaatctaccttgagcatggcattagcaattatatctacgcacatttcaatcgctaacttccggtatacataatcattttcaagtgagcagtaatattgttcgatatcattaattgagtgatgaaaaaaattttgtttcaatttgctaatcattcccatttatgaatcacctcctttcctaaaagactagtgggccacttcctccaaagtcggctgtgtccatatcttcaaattcaccgtaatcaactaaatcatccctggcggccatcgcatgagtaaatgcgaagaacccatcagtctttcgcgattccttttcaattttcaggtattcaacgttatcatttggcaagaaatgcttgtaaacattcattgtgtaccagcgcattaaaggatcatcaccaaagaataaagtgtgatcaatgaacatcgatgtcagtgttgggtccatttttgaatgttcaatacggccacgccgcacaatcttgattttgaaccccgcttcttttaatgccggagcaagaatcgacgcccgaaattcatccatacaaatttctttaatgaaatacttgtcagcctgttcaataaaccagtcgacaactgttctaggttcaatcttgcgaccgtggacaatctcggccacacctttttcaacagcgatatcaacaatatcttgattgatattctgaagttctagcgctttgtaataaataaaggtgtgctgcttccagtaagtctttcctttatatttaaagaacaaaccaactgaacaaaagtcacgaatttcagcgtaatcaataccgccaatacattccgaaacaccttcgggtatatcttcatcttgcgtctttaaaacgtcctcgtagtccgctacggcaaaccttgtgtcttcgattggcgagttcattcgtttggtcatgaactcaattcttaacgacgcgttccgctgcatttttgcgtactcttgtagcattttcgttttcaaactcgaattaaaattaaaacttggacttgctttttcccagttgtcaacgttgtcaacttcatctggtgaatctagtcgaaaaataagaggtagcatggttgaatatgctgccccttttttgtcaatacctaattcaccatttaaaatcccgcgcgattcctcttttaaatcatcaagcgggccaccacgaacttgaccatcagtagtgatataaaactcacgataatcgtcaatcttcccgccaccagaagtggcaaccgaaattgatttataatccgcatattcgtgaacttcatcaaacacatttgctccgggtcgcttaccatctttagttctagcgttagcagtattgaattgaattctacttttagttttaaggttagtaattacttcttttcgcttacgatagctattttcaagcgctggatgatcctccaaaacgctataaatatcatcaaaacttgtcttggcttgatcttcggatgtcgcgttaagttcgacgtcataatgtttgatgccatttaaaccacttgttaaataaaatgagttccacgcaatccaaccgttttttcctgacccacgaccaacataaacgaaataaatattaaacactaactcgccatcttttttccatctcagaccgtagataaatgtttgaataaatttctgccacaagaaaagttcgaacggaaaatactttttcggcacgttaatcgaattctcaacggctttttcatcaagccaaacatcatcccgattaagaacccggttctttagataatcaataagcaagtattgatccttgcagacgcgaatctcaccaccatcaacagcgtcaaaatacgctttgatgtacttataatccgtcagtttcgtcgtcatcttgaacaacaccactcaaatctaagccgtcgagaatagcggccattgttttagtaatctttggtagctcttttagagcgtcattggtcttcaaacctttttgaccgccgccattatcgtatttagtaatggctttggtcttgccgacagctttttccagctgcttacgaatctgccagtacatcatatattcatcaattttatccagcatgaaaggtgcaggcttccctttagcttccaacgctgcgattaacgattttttaatcaaatcagattgcacattttggcttaattcctctggtttagtcatgaaccaccacccctttttaaaatcgtatgaaatgttttctctgattaaccctctttccgtttccagcctcccccggaatcctcgatttttttcgatggggggactatctaacgaactaagccgttgaattgtttcgtgaaatcaacgtagaaattcacttcatcttctgaatagccgtaatttgcgattacacgactcataacatcttcgtgggttaattcaccctttacttcttcgatgtctggttgcgtgcagcaatggccactcacgatgcttctaacatagatgtatcgcatatagattaattgaaacgctgttcgatagaccgctctatccatcacgtcttgtccctcagcttgtttgataatcaagtcagtgtcatagactcttgagttatctttaatgatcactaatatcaccacctttcctgtgcattaaagttactgaacttatcttctggtttggttcttacgattggttgataacgatcatggatgaagttatgatgcttaatacagatacattcgatgttgctaaaagtaagtgcaaggtctggccgctccttaacctctagaatatgatggacattctcggctctgtgatacttaccctcagccctacacatcacgcattcgtaatggtctcgcttcagtgccttagctcttagactccgccactccttgcacttgtagaacttgaccaacttatcttgttggataagatcaagtaaccagcgatagaacttattagtcattgccgaacccaaccaccaaccctttaatacgtttataaggcttaccttgtcgataagtagtggtttctgattcatagcagttaacgcccatggtttgcaagaatttagttaaataacctagatcactgtttaaatgcttttcttcaaatttaacagcccgcgaaacgtctgctaccttttctatttcatctttaataaacataatgtcggcgagtagcttagcttctttctctgccttggtatctggttctatctgacttttagcaaaggcgtcaccaacctgtgtgatatgaaccccgacttcatcagagctataaccatgattagcaacgttcacagcgttccattcttttgcattgatggtgccagctgttatgctcataactcttttaacatccgtacatgcttgctgtgcaaccttgttggcatgatatgcaactatttcctctttatgaatatcaaccaaatcatcaacgtaaggcttaatggctctgcttgatatttctagcgctgcgacacgtctttctaaatcgccatcaagagcggcagccggaatagattcattatcaaataccgtctggcgagtaacgtgtaatgattctttattacgtttaaataaatcaaacatttaatgacctcctcgaatttaggcaacaaaaaaggcgcaccctttcggatgtgccttatctgtaaattactatgctattactataaaccgccctaatcaataaaaccatacactttgtgaggtctcataaaagtcacattgtctattctccacgtttagctttttcccattcttgtttaaaatattcgctttctttttttaaagcattttgaatcagcttagggaagtaatcatttttatatttatttttgtcatgctctagcaactgatcatattcaccatgtgctttactaatctcatgccacattaattttacatccgttagaacaatgtcgttgctactattatcaggaataaacaatataatctggcgatactgtctctttgcaatttctaattgattagtcaatgcgctatcggttactctaacgttaccatcttggtctttgtccccatccatatatagtcccagcatgaatatgtatttgtccgatgcaacccagaattctgctaaaatcactcgtacagtttccatccacttcactctacttttagaaattaaatccgcctttaacttacgccgactatcccatgcagtaaatgttaacgaaataattgctaatactgatgtaataccaatccaattaaacttatttttttctgtaacaaataaaaatcggattaactgatttgactgaatccccctcatattaagagcgataattaataaataaccaatcaggcaaataattattacaatttttgctattaatttaattgatacaatccaccttttattcgcattacttttttcccacattttaccccattctacagcaacttcccatatcttaactcctaataatattaacaatgcaatagctacaatcacactcaatgctaataattcattacccatcaaaatacccccaataaaaaatagacttacctaagtaagtctatcgtaattgttcacgtccaacaacttgattatagtatttatcttcgtcccaacgatccaagaaatctaatcgccgatgtagttcagcatgcttctttcggatataagacagtgtatagtgtacgtcatcggcgtcggcaatttcttcaagtgtctggccgtcgatatatttcttgcgtagaatctgttcttcgattccgtcgaacgtactaaccaagtcttttaaatcttgcttagcttgtgtacgccactctaattctgattcgagtctttcaatcgattcttcaactttggcgcctttagaacccttaaccaaatgatccccacttaaatctccgctagttctgcgttcaagttcagctttagtttttaagaggttccattttaaatatttaatatcatgatcaagctgttcatattcctgtaaccattcaaaccgtttttcacgtattgccaattacgccaccccttagtttttggtataatattaacaggatgttaaagggatggccgtgtgtggtagcgcggtctttttttgtgcctaaaacatctcttcaatcttgattgtaagctggtggatcctctcgtaagctacttctatttctttatttaaatcgcagttggcttgctctaaccattcattttgtttctttagccgcttgttatcagctttgagttgctcgtagttgtccattagcttcaccccttattaaacacaatatacgtaccaactgctgtcccacattgaatcaactgcattactgccaaatcatgatctgcgctgtcgcagataaactcatcattttcaaactcacaaaaattagaatgagcgatagcttcacagatacgtttagccttatgctggtaaaccatttctatttcatagtaatagtaaccaccatcgctaaaccgattgccgtatctggtaaaaaccatttggtcaccgctataatctgtggcgattgtatcaatacgtgttttagccagatttaaagcattgactaaatatttttctgtatagaagtccattattaagcctccaagtcttcatctttaacatccgatacttcctcaatactaatgatgtcaactgaagttgtagggacaattgttgctgaatctttcccgttaaaaacggctcctatgtcaagaatccggacataaaagtacgagcaaatttgactttcaatttaaattacttaatttaattttcggaggccgaagttttagtcccgttcagattttaaaaacgctttagagtatattaaataagccccaacattattgaatttaatagcctgtagctacgctacaagtgaaatacgatcactgttataccaacgaatatagttatcaattccggcgattgcttcatgaattgtcttaaaatcttggaaattaacgtattcacgtttcaaaattgaatgaaaactttcaattcgcgcgttatcgccgggctgaccctttcgggagtaagaatgcttgataccatacttcgataaagtgttttcaaataagtcacttgtgtattggcttcccatatcactatgaataatttgtggtttaactgcttgcgccatgacttgggtaataacgttagtcgctagttctttagtcatctgcgtattaagttggtaagcaataacccgtcgggttactggattataaacactagctaggtaacaccaagtatggttaaggggaatgtacgtaatatcagtcaataaaataccagattgatcagttaactgcttaatcaagtttggtcgctgatcataatcagtctgagtggttggcttattgattcgtttaaccattctagatctaatccctaattcacacatttgttgatagaccagacgctgactaacgtgaatatcagactgttgatttagtaagatcgttaatcgtgggtagccatacattggatatcttaaccaagccgttaacacttcttgtttaattaaatgccggcggcgttcagttctacttggctgccaatgtagataatcatagtaggttgagcgcggaattttgagtactgataagatacgcgtaatgcggtgcccagcaagtaaattagcgttgacgacttctaacacgagggcacgccctttaataattagctttttgccatgagcaccgccgctcgttttaaaatatcaagttcttcttttaaccgtttattttctttaatcagagcacgttcatttgatgatagcactttagtgttgttaggatcagcttgtttaatccacttagtgaccgttgaaacactgacgttgtattctttagccagtgagttggccgaacggccagtctgacttaagctaacaatcgattctttaaattcatttgaatatttaattgccataataaaaagctcctttatgatgtattatatcgaacagtttgtccgtaattccatcataggagccaacaatagcaggtcttcgttttttaaaccctttatagagcctctctgctaagctattacgactttcagtagtgtcaatttcacattgcttaccagtcttagtgtagattgttactttcctcattcttccacctccacataactagccttaaacacatcgtcagcaatcgcccagtgttcaccttgaatgcctgtagctatccaatcgccaacatgaatctgtagaacgccctctaaggttttgatatagcataatgacggttcgagaacacgaccgtcgggcatagttgagccaaccacaatatcgtacttatcaattagctcctgactaccgtcaaattgttcagcttcgattggtacagtcttaatgtatttcatcacttacttcacatccgatttcacgatttcccctatttcctcaacgcgccagacacctagcacccatgcactagcgaaagtatctgaattacgctcatcgtatatccatgaagcaattcttgtgggcgcgtaacccatcgcatcacttacattgccaataccgccctcgcctttgcaccatctgatgtatttgcccactgctttcggaatcaccggcatattatctggcaatgcttcgtcactggccgcagagtaacgggcgcttaggtcatcataggccatctcccaactactaccctgctcgccgaactcttccaatgctctcaatgcgtcctcgaacacgtcccacttcgtctcattgttcatcgcgcacctccacaatagtcattgcaggaacagtccaccattccggcttttcatacgctgcgtccatgaagttgtcggcttcatcataggtgtcgaacgtcgcgatgatctcgtgtgaaaacatatcttggcactcatacttaattgtcatttcttttcctccaatagttctgggttagtgtgcacgttgccaattacaatatcttgtgcaatatttattccaccataaccatgttccttattttgaataatagaattaaaacaggcaccatatctatcggctttataaacaataattccaaattcatttttggctttaatttttttattagcaccaaaaaatttaataatgtcgccttcataaatttcttcgccgttcatgtctgtcaggccggtaaactgttcaagcttaaaatcacttgcatctaaggcgtccaaggtcaaccctttcaattcgtcatattccctaattaccttgcactcgttatcccacgctctaaacttaatctctcgcatgttaatcctcctgactgctaacgcggtctttttatttgagttacttttgaactatttccattttggcaactgttgcattttttgaaccagttcgattagtggttgtttccaaattggaaagtaccactggttattacggataatgtaacaaccacttacatttgattattcgttcatgtttgacgattatgcactaatcttcaaatgttaatcatcttcaattcgtatagcaatcaacgaattacctttgtttttcctccaataagccggcgccgtccaataccagattgttttacgcaggacaccaagcttattggccaaatagtccgcagtcccaaggtcgatgaattggtcgcccttgtaaactgcgtattcagcagccatcttaatcacccagctccctgaaacattcagggcaccgcttaatctgcgaccatgattgctgaacacctcttcggtaaaagctaacagaataataaacgttatcgtgattagtaattttcccgccgctcggtgttacattataaggcggtctgcaatacttacattcattcatcagctttgccctcctcattcaaatcaaccacttcgccaaaacctaattggtcaatataatagaaagcgttacttttaaaaccaaactctttcgcatgctgcatgtcagtaaacttagtcgacgcggtatcatattcattcaaataataacttcccgctttaatcccccatcttggttccggttcagcctcgtacccatagcgtagagcgtcaattagtagccattggttgtccacatcagcactgagccaataagaaacttctttttgctccaatttacgtaaacagttcacttttgtaattacgtttagtgggtaatctttttcaaaaccttttaaccaatcgcacacaaacttcggtaacttcactttttcactcatagctttactctcctgtggtttgtattcgactgctagggctttgtaaatatccatcaacccctctgccaattcgtctgtcatttccagcatgatgactgattcatctgatggcaaaggatgcttataagattttcctttaaagaacgctttatggtcgtcaggttgtactttccaaatcgctttaatattcgctaggttcgggattgtttcgattgttatatcttgattaccctcataatatgacttataacgatactctagactcgcgttctctcgcatcaaaacgaccggttcacgttcgtaattaccaaaattgcgtttctcagtcggcttgcaaccggagcgccacacataccccgcagcttccgccaatcgcattagcgcatcgtagttggcttgtgttggtgtttctatatataagtctgtcatcacttaaccctcctaataatcatgcttgtgcatcctcaggggttaattcaataatgctgtaacctttaatatctttgttaaagtctcgataatgttggaattgactaacgctaaccgctagaaacttggcagcttgtgtcattgaccggaatttaagcaccttgccatctcgtgataatccgactggtaccactctatcccttttactaccctgtatctctagcccttgcgccttaacaatatgataaatggcgctgtcagcgatacctgtaatttttgctgtttcaatcacggttttcccgctagcgatacaggcggtgacatctttaacccgttgacgtcgcatttctggtgatatccgctttgtatttctcttgaatttaatgccttgttggtgctgaatgttgcttagcgtcgagttgctaatgcccatttcgattaagcattcttgccgattcatgccattattgaatagttttctaagctgcttacctaaccgttcatgataatgtacaagtgtttcatcctgttgcttcacagcataatcgcgtacataatacttattttttagatcatcagtggttgttggtgtcaaggctctctctaaatcacgcttattgataatcgccacaggttcgctcggattggcctttaaacggtgctggttaacctccgaccgataatcagcttcatacaacacagattgcgtctccatgcctaataacacatatgtcattgttcacacctcctagaatggtaaatcatcatcattaatatcaatcgcttgcccgttaccagcgaacggatcgctttgcgacttattggccatttcgttcccttgattagttcctgttccagtgtttttgccgttaattgccgctttattcggtctcttatcgttcccacgtgattccaatagactgaaattatcaacgactacttcggtcacataaatacgctggccttgctggttctcatagtttctcgtttgaagtcggccgtcaatcccgactaacgaacctttgtgcgtaaagtttgcgaagttttccgctgatttacgccaaataacacaattaataaagtccgcttcacggtcaccattggcatttgtaaactggcggttaacggctaagttaaacgagccaaccgctgcacctgacgacgtatatttaagctctgggtcttttgtcaatcgtcctattagaattactctgttaatcatttctattccccctaatatggcaagcagtagtctgcaatgactgctcgtttgtcttcttctgtcatattttcatatgcgttgcttagttctttattgacgtggtagtaaataatgtctaaaagcgtcttatagcccgtagcaaagtcgttaccagataatcccactgatttatctaagttgtcgtagaataactgttgttcgtctgtaaaatcgttatgatccatgtacttcaacctccactctaggttcatctgaataatatttgtgcgctgccacatctgttatttggttatcatcgagccatacaagcccatttaagccatctaaaatgattttgatgtaattatccgcgtcgggtttgactgtcggtctaacctcatttgagagccttctagcatattccttcttgctaactgatttctggattgaccggtagacatttatatcaacttcaattggacaatcaatcggttgataatcatctggtagctgttgcatagcctgctctttaagcagagtcttataatcccgactctttttgggatcatacgctttaacaaagccaccgcggctactgaacctaggccgcccagctgcaaccggctcacccatgattactagtttcatagccttgcgcctttctgtagttatcattgcattgtgggcaaggactaaccgtcatgccgtaaccatgatcaacatgaatgactttcttgtcgttacataaattgcacattagaaaataacctcccgtttatccggcgttgcgttagtaaacttaattacgccatcattcttagcaacacctttgttcatacgactaatcaacttgggattatatatttcttttaactctttagtagttaagttcgtcgtaataatggttcggttccgcttatttaaaataccgaacaggacgccttgcacccaatcgctagcctcggttgattctcttttaaacgaagcctcactgcctaaatcatctaaaacaagcaagctaactctgcccataagactagtcatgtattcctcagtatatttgctctgtttgttgctaaatgaactcctaatcaatcgcatggcttcattaactgaaatgaacaagcatgatgcgtcaggcttaatgtagtcattgaccccttttagcattgaaacggctaaatgtgatttgccaacaccgggtaagccagtaataatcgtgttagcttgatagtcgcggtctaaataccgacctgctatctgctttgctttttttaaatttaattctgcttcactacctggttctacttcataattatcaaaactcgctttttttagatcataatcatccatgattgaatcattctccaagacaccatgaaagtctcgtcgatatgcttgccaaacaccagtcaacactgcttcattgtgtctgtgtctaatattattttgagcacacttagggcagaattcagcatgatccttcaaagctactaagttcacatctggatgaataggacaatacgtcgtgagtgtcttcacccgttttaatagctcaaaattcaaccccactgttagaacgctcctctctatttgttactttagtctgctgatttaaatactgatcaaacttatttccaaacaacgtgctaggttgcagatacttcgccatatcggttcctagccactcgctagacttgttatcgataacctttttaaagtcgtctaaagcggctttctcgtgccatctagctctaattaatttcttatgtgtttcaacatttttaaaactcttcccagtcacctgatttaagtagctgattatttctgcgtatgggatagggtcgggtttgcccgacaatggttttatattatttgtattattaactgtattattaaaagatgtattattaactggtaggttttccttgctaggggtagccagtttttcctgactagggtagctagtaattcctatatacctagcttggatttccttgctaccctccttataaacaacttgccgattgatatatccgcagtcctcaagcgatttaagccatgcttgaattgtgaatcggctaacttcatagagtttcataaagtaattgttacttgcccagcagtaacctttctggttgctaagcgccgtaatttcaccgtaaagcaacttagcgccttgaatcagtcgcttatcatatcgcacgttagccgggattatcgcgtagtaattcggctcttccttatgatccatttgagtcctccttatcttcgtagtcgcctctgatttttaatattcttagtgtttctaagtccggtttaaccggtttgatgtgataataattaataaatgagttaatccctttgttgtgttgctcggtatgatggttaacacaaagcggcataacgaatcgtttagtatggtcaaccttgttccgattaacacccatgccaacagcgttaacatgcgcaaactgtgctcgtttaccgcagatgacacatttacgatgctttaaacattgcaacgttaaatgataatctgtcgggatcatgtcccatgttttagtcctaaaaggtatgtcttcctcaaaacagaaatctaagataaatgttaagtagctcgttgctagtgacatgctgcagttgctcaagctgaaccattcaattcctttgcgttggatgaactgatatttaaaccacgcttccattgcgtcgtctggatagcctaagtagtcgcagacgtcatgaatcagcgcgtacgtctttttacgttggtcaggactaatacgcctaccgtcttcaatctcgatgctgacggacacctgacgaccgttagcgtacttaccaatcttatagatgtctaactcatcatctgtttcaatctcaagtttgtgtttagagtacttaccgagtttgccgtaaaccgtcatttttcttcaaattggccttgctgtaatttataaaagttaagtgctccagctaactggaatacttctgcgtatgttagatcagcaggcttcttgtccttgtgcttaagaactaatcgtaatttgtcgatttcgtctttttttagattcataaactctgatgtaatccatttggcaactcgctctctagcctcttcttgcttggctttgtaatcatcaagcaatgcaacagattgtccatcgtcatcatcatctgcaacaacgccaaatgctaggcataaacttgttctttttgcataagtttcattggcaccttgagtttgcatttttgcatctcgcggaaatgaatcaccataaatggttagtgactcaccgctaatgtgtcggatcgttgtgtaaatcttgcaagaatccttaccgccgtttgcggtttgattatctaaaatgccttgataaaagctaagacctgagtcagcctttttaatcgctttgcgaatcgccgaatcaatagcgcttaaatcggcatatttaccgtaatgcgcttctttatttttaacgggttgtacaaacacctttgcagtttcatacaacgccttattaagttctggcgtctgttctgtatttaattcttgagtaatcatatttattccgcccccattgcttctagtaagaattcagaatctaagccatagtcttctaacatctgaattaaatcgtgatcgctctcgcgtagtagatttttcaatacataatcacatgaatagtcttcatctgcccagaaagaatagtttgtttcttcgccagtctttggatcaacacccgatatgtgtaatcggatgtgttttgcagttcctgtaagcatttaaatatcctcatttcattttttagttatctcgtgatacaatgaagttaaattagtggtcgaatactaattaacctggtcgtcagtgtcttcagcactgtcggcttttttattgcgcttttcgattaggcttaacataccggccgtcgataaacttaataacgttactattagacttgtcatcatcgaacccccatagatttttaaatccgattttgccagctccgtagcacagagccgcgacgctggtaagtaatagtaagaaaacaaaacaatcgatttgaatcattacgcgcctccttgcttaacgaacgcagcaacgccaatcttgccttttgatagcccaaagcactccgcgccgtcgtatttggtatagtccggcttgcctaggattgaagcaaactctcgcgcttcaatcttgttcagacggtgcttagtgaaacccactcggtcacaactgcgataaagccttaatacagttaattcgtcatcagttacataaatcttattcatttcgcaacacctttctttgatcgatgattttgtgcatttgaatgtgtttcaatttaacttcggcctgctcgcgataccacttgtcagcagccgctcttgcttgttcaaaatccatttccaatctccttaaattcctcacgcataaacgtgctaaatttagttggttcaaattgccatgtgctgccaggtcctttagctggtatgacgcataactcaaggtctctcttgaattttggttgatacaaaaccttgtctttaaaccaatcaagatcatgtccgtaacgttcttttaaatctttggtagtccaccagcgatcataatcagcgcgttgtttgagctcctcgtattctttagcgtcaacgataatctggcctggcaagtcgattggaacgttttttaagttaattgttaaaaccgtcatcgctagttcctcctttattcgttgttttcttcgaagatgaatagaatttcagataaacgactggcatttttagcaaggctgacagctacctgactgttcggaatcgctttaccatccatagtgactgcactaccacctgctaacgcatcgtaatcaaacttaatttcatccattaacatttcaaattcttcatctagttttttcatatttaccctctttttattaatccaattcaagttcctgttgtcgaacaatcgttttagttgcagtcgatggttcccagtcattaatgaactccattacttggtcgtagtgcttttcacgtaactgcgaacgagtacccacaccagttatcgctttaataccttgattaatgtccacatataacgcgcctcgctgctttggcgttaattttccaaagcccttaccgacttcactaactcgttgattaatacggcgcgacaagtagctgtacacgcttggcgataatggtgcgttgttttctagatcagatacccgtgtatcaatttcttctactcttccgttcgcttcaacgacattttgcattaataaagcgagtttttcttgtggcgttaatggtaatttgttctgatttttaacttcgctttccatctggttgaatgcttcaatgtatttcaatttgaagctcagagccttcttgccagtaaaacccattgccaataatgtgaagccatctctgttcatatagataactcggtattgttgtttattttggggatgtgtataaacatcttcatagaataggtctgtccgattttggacacccccatccgtggggtctgcgaaattctgcgcaaccccatctcgcagctcgtcaacgctttttaaaacgtcacgatggttcttctcaaacacctctgctacttgcaaactgctcgttactgcttgttgatttttcatgattactaaattgttcattttacttcctccctatttctttaaaattattcactatcgataattcctagaagattcttaatctcttttacatagaaatctgttcgttttccgtttcgttttccattaagaacatcagagagctgtccttcgttaatgccgatttctttagcaagccatttttgctttttgtctcgtaaagccaaagcaactttaacttttatttttaaacttttactcatacttccacctcctagtacgtaataaagtaaaattaatttataaaaatcattgacgttttacgttctatagtataatattagggcatagtaaaaagccataacaaaagcgtttcggtcactggcaggcgtccgagtaaactatatttgttaactttttttataaattaaattaacttacaagaacaatataacgtcttttagaacgtaagtcaaatgttttttacgtttttttgaacgcaaatattttctttctgttagaaaggctgtcttatggatatctataaccgaattaaagagttggctaacactcaaaaaatatctattaatagacttgaagaaaatttaggcttcgcgcgagggtatctgtattcctggaaaaagaaaactcctggcgttgataaattacaaaaagtggccgattattttcaagtttcaacagattatcttttggggagagctgataatatgaataaacaagggaaaagcgataaatataatcatgatttaaaagagtttatcgaaagcaacatggatggtatggcttatggtggtgagaatctaaccgaagacgataagcgaaaactagaaatggctttaaagctagtatttgataaatataacgataaattctaaaggttgtgatttcttggtggatttggacaaattgagtattgttgaatttatcggcaaaagatatggaacgttcaatccgtttgttattgctgataaactaaatatagcaattgaatggtgtgatttaggaaataatttaatgggaaaggttgcttatataggaggtcaccctatcgttctgcttaatgagtcattcgaagataggagctcacagtatttctattgtgcgcacgagttagcgcacgttatatggcaagaaggtcttactggtgcttacaatttaaatagtcaatttaaaagtaagtttgaataccaagcgacgcaatacgctattttgattcttatcaatctctatcgtgaagattacgacaggttgccaagtacttatcgcgaattagaaactgaatatggtattccagagcaataaaaaagccctaccgaatcttggggattcgacagggctacatttctcacaaaaaaattatatcatattttggagggtttaaaatgaaaaaaacgtatttgctaagcgctatagcgcttctatcaattgggttagcagcttgcagcaataataaggattcatcaaccgaatctacaacgacgcaagttggttcatcggctaacagaaaacttgctaaagatttagacaagcaatttaacaccgatggacaaagagttgttaaaactaaggttgaaactgatgtcgttgacgatcaatctaaaactgatagcaaaggcaatcaaaaaccacatgaagtaattaacgtcaatgttatcgacaaggaaacagctgataaattaaaaactgataaagccgctattgataacgactctgcaactactgatcaaaaaatgtatattgctggcattcaggaaataatatcaaaagaagctaaaaaattatcaaacgaaaacgatacaattaaatttggtcataaaatagatggtgacaatacagatgtttacgccctatcttctaagactaaagatgttattacacaagtgactgtggactaaaacaaataaaatagcacatcccccaccgaccaaagttaaggatgtgctaaatgaaaaaggtacgcataagcgtaacgctctttgtgtaccctattttacagaaaataggaggattttacaacatggcacaagtatatgaaaaacaaggctcgtgggcctaccgggtattctattacgaaaacgggaaacgtagatctaaaaataagcaaggttttaaaagtgcaaaagaagcaaccattcacgcgaacgcccttgagatgaaactctaccaaggcgcagatattggccgtaatgatattctttttgttgactatttagaacaatggtttgctgtttacaaggttggcaaacatacgcttgtcaccgaatcacgctatcccctaattgttggtgtcatcaagaaatattttggtaaacgaaagttacgtgaagtgactaaaacagagtaccaaaaatttctaaacgactacactaatcgaaaaggcgagagccgtgagggcaaaagatctaaaactacggttcgaaagctacacggatatatcgcatcgatggcccagaccgcaatagatgaccaaataatatattctgacttcacgcacaatgctgttattgacggtgcagacggcaaaaaagaatctgataagtttatgcaagttgacgacttatctaaattgaagcagctggtaatagatgaattagactttaaaaaaacgggcaagtatatcattctaactggaattttaactggcgcccgttattctgaaattgttggtctcacatgggatgacatagattttactaataaaaaaatcaacatcgataaaacgtgggactacaagttttacactgggtttaatccaactaagacgaaagcgtcaatccgaaccgttgacgttacagacgagttgctaaaccccctacgtcatttaaaaactgaacaagctgaacacttcttaaaaatcggttatcgtgatgaatacaatcttgtgttcagaaataaccgtcgtgaaattccgtctaatagcgcagctaacaaactgcttaaatcactagaaaatagattaaacttcaaccagtcgtacacctttcattcgttacgtcatagccatgtttcctacttgctttctaaaggcgtcgatatattttacatctcaaaacggattggccatagtgatgtaacaactactgaaaaagtgtactcacatcttttggacagcacctcaaaaattgaaacgtccaaggctcttaaagctctcaacgatctttaaaaaggtgtgcagaaaagtgtgcagaacataattctttaaaaggttttataagcttttaaaataaaaaagaaaaagctagaaacgccgttacggtaacgtttctagctttttattaatcctttaaaaaggtttaaaattgtgttcctaatggagccggcgggggttgaacccgcgtccatgcgcattgccacgtcaatctctacactcatagtcgaactatttagaaattcgctagcccaaaacgccgttcaacagaggctcggatggactaactagcttgaaaatctcttttaaacacttcaaacggcggcatttaacgtaacccaattaatttgagacccggatctaacccttgggtgaagtcagacggatcacgctatgctggtgtttaggcagctacagcgtaagaattgttattgtttgcagttataattaactgtaacgttgttaacgcagacgtaacctacgaagtgcaattcacgctcacctacacatgtcgaatccgtaacggccccgatatgcatagcatattttatcataaattcgcgtaatataaaaggattacgccgatttaaccactaatcgtttctcagggaaccgttctttgaggaatttagctagcgttgcgctatccaatttaaactttaacgtcgtaatttgaatttgaccgctaaacacttgcacgaccgtttcggcctcttttgtgattaattcaatcttagaaattgcggcaaattgacgaaccgtatttaaattagcaattagcatggtcttagtaaacccctttggccaaaaggcgaagactaacaagatgatgaccgacgcaacaccggtcagtttatcatctaccgatcccgtgacaacaacactggcaatcagtaacccaattgcaattaccgttaaaatgatgcgcatcacgcgactactcttagcgcgatataccatatgaaactgcacgactagccaaatgactaataaagacattgctaggatgctataaaaaattgtaaaactcgacattgctttgaacctccaataaaaaaggaccagcaatacgctgatcactttttaaacttatttaatttgaccgactgacataacgtctctggcgatcatgacttcttcatttgtaggtactaagagcaccttaacttttgaatcatcagtactaataatccgttcttgtgccatcacgttattccgttctggatcaacttcaacaccgaaatagctaaggcgatcgccaattcgttgacgcattaaaatatcgccttcacccataccagctgtaatcactaagacatctaagccacccataatcgcaacgtatgaaccaacatacttgattagacgattaacaaaaatatcgattgccaattgtgattctgggcgttcttctcttgtcttttcaagatcgcgcatatcaggtgataatcctgaaataccgtaaattcctgatttcttgttcaagatatcaatcatctcttctggatccttgatatctaatttcttcattaagaaagcgactaatgacgcatcgatatccccagaacgggtactcatcgtaacaccagcaagtggtgtgaagcccattgaagtgtctaatgatttaccatctttgatagcagtcattgaaacgccactaccaagatgcatagtaatcatcttcaaatcttctaatggttttcctaacatttcagcagcacgatgtgaaacataacggtgactagtcccatgagcaccgtatttacgagccccatatttacgataataatctaatggtaaactgtaaagatagttttcttcgggcattgtcgtgtggaaagaagtatcaaagactgccacttgtggcacattaggcaaaatattacggaaagcacgaatcacaccagcttcagcaggattatgcaatggtgcatattcagctaattcttcgatacgttttaatgatgcttcagtaatcaaggctgatgttttaaaatcttcgcctccggcaacaacccggtggccaatcccactaatttcagaatattcagcaataatcttaaattcgattaacttcttaagtaataaatcaaccgcaacatcttgagtttcaatatcttgcgtgatttcatatttttgaccatcaccatatttaacagtgaagacagaatcggataagccgagacgatcaaccatccctttggcaatcaccttttcttcaggcattacaaataatttccattttaaagttgaactgccggcattaattgctaaaatttttgacatctaatcaccttttctattcgattaattaatattttctttatgccaagtccgaatctgttgtaaatacgcagcgaacgctttttgatcgtttgaatttggaaattcacctaatagaatttgcttagcttgttgggcaccagcaccttgtttttgtaagaccaaaatggctttttgaccctctttagtcttaaacaagttaactggtaagctcaataaaccttgcaagtagacgtgtttagtaatccattttaccagttgcttcgcttcatctgtttccaaaataacatttggtacaaggaagaacccaaaaccgccgtctttaacataatgcatcgtttgttcaattaataaatgatgcgcatatgagtgtccactagcagcatgtgtttcaaaatctgctgctcgttcatcaattggataaaaaccaattggtaaatcggcaaccgcgatatcaactggattaaccattaatggttcaatcgcatcttgatggaataaagtggtgtctaacccttgtaactcactactaataccggctaattctagcagactatcatcgttatcaaccccaaaaccttggagcttattacccgttagattttgaatatgattcataacagttgctaataaattacctgtaccaatcactgggtccaacactgtcttaatttgatcagcgccaccaaatacttccgccaaatatgcgactaaataaccaattgcatcaggtgtcatttgtttattaggctccactttaacttgacgaagcccttttaaggttgccagttgtaaggcttgacgaatggtctccgcatcaaactggttaagcttaaccgttgcgtaaattgtttcaagttgtgcgacagtttgcgcatctggtaaattatcttcaaccttcacacgaccaccatcagcaatattggcaattgattcagtcaatgcatctaaataggttgtttctaaattctgttcaatcaacgttgttgtttgatcaattaagtcaaacaacgtttctacagcactcttaggcaaaatagccacctctattcattggattctgttatattctagcggtaatccaacatcaacgcaagtaatacagatggttacattacaaattataagccatagtaagcgctttatcaaatggaatttttattttttacctgttatattttttatttcaaactgtttctgatagccattcttaagcgtcaccttgatttgatgctgtttccttagaattttgctttcacctgttgtggctttaatcccctttaaatcagtcttggattgactagccaaggtcagctcataaagtgttttagcttgataatgattcagcaaataccgataactctgttgttgctgttgataactatgtgtcacacctactaatacgacgctgattaatgtcagtattaatatcgcgttaagtaatgcaaccgccgaatgtttaatcggttttgatcgtcttttttttagcctgttcatcttgttcctccaagaaaacttcgtgttggtagcgactctgatccgtaaaagtcgtatcgatttgaacaaacggtcgctgatagtcaagttgaagttgcttgagtttgcctaataatggcatatacccatctaattgactgacaacaaccatttcatttttcatcctttttaaatagtaaacagtctctgcttcctcccctgactgattagtgtctggttttcgaaaagtgattttggagccatcttgatcctgatgatgtgtaaaatacgcatcggctaaaaactgatctaactgaatcgtactgatatgccaattgattgtattttgctgttgttgtgtcactttaattgccttttgtaaaacacccaccgttgccaccaataactgactcgtcaggattagaatcgccattgaaatcaccatttcaattagcgtgaacgctgaatgcttaatcggtcgtccaattaatcgcaaccgactcacctgcctttgtggttacctttaatttctgctgattagccgtcactgtatagattgttcgccccatttgccaccgttttttcactgtctgatgcgctctcaactgctcagcagccattgctagaaccgcctgttgtgcaacttgctgttgtttaagcgtttgttgttgcttaaagtgtagtagacttaccgttaatagccagcaagcccctaatactaaggttaaggcgatgatattttcaacgagtaaaaaagccggcctacttctgaacatgtaatatcccccacatcatctggactttatactgatattcacgattattaagcgttgattttaactttaaggtgcgcggtttaatacccttattatgagtaatattaattaaatgccattcggctggattactcactgttaaagtttctggtaatacgagttgatgatttctaaatgactcaccagcacctttaaatgtgatcgtatgtgttggtgcatcccacatcacacggacggcacgcggttcaattgccacatattgacgagctgcatcccaactcgtttcaaattgatgtagaaacaactgctcagcctgttgcgcacgatattgcttaatctgataaatcggcaaccagcttaataagctcacaatcgctaagaccacgcacatttcaatcaacgtaaaaccttcatttttgcttaaccgtgccgccttcaattgtaatccccttctcctttgcgtgctttaattggtcttttgaaatatacttatccgttaattcgtctagactcttaatttgatgaccaatctcgtcgctagctaattcaacttgcgtttgcaaagtcgtcaccaaagcttgatccgttttcttctccgcgcgctgtttttgagcacctaggtttggtgcaactaataagattaataacgcaataatggcaagaacaactaccatttcgattagtgtaaaagcatttctttttttcttcatgaaattccctccattgtttgatacagcggtaataaaatactgagatacgtacaaataataatgaacccaattaagataaataaaataggttgtaaccagctcactttacgctgtaattgcttctgtagttccgtatactgcaggttagctagcatagtgatctcatcggtcgtctgttgcgtaagattatgcttagccaataccaatcgtaacgactgtggaaaaaatgcagagcgactaagataagcatccaatgattgccccgaagcgagtacaacctctaattgcgctaccaaggttaccagccatgtattttgttgcagttgcttctgtaaagcacaaatttccgttaacttgagtccgttttgcagacaagtgctcaaatcaaataataaacaataatgataatactgctgaatatcacgcccaatgattggccacttgaacgctttttgtaatcgaactaaaaccggtaaccggcggtaaaccataaaaagaccgctgcccattatcaaaaggactagcactaacaaaaaaccccacaatatgatgcgattaagcggcgagcctgtctggtttgactcgggcgttatctgggcaatctcaggtaataaataatggcgtaataaaccgattaagccccctaaaaaagccaaaagaaataacggataagctagtaccccacgtatttctcggcggcgtttttggcggatactttgaatctgacctaaatgccataaacattgcccgagattaccttgtaattcggttagttcaatctgaccaacataatcagttggaaaatcaacatgcgctaaactgactgctagactgtcgcctttttcaagggcttgattcacctgatttaaccactgtcgttgttttgggaagacaatcggtaagaaggcaaaagcttgttgcaatgaaaaaccgttctctaatagccgccccaataactgcaagaaatcagcgtaaaattgcgcttgttgtcgtaacttatacatcgcaaccaccttctttttttgagaaataatctggaccagttaataattcataatgggcttgcacaacgtcgtcttttgtcaccaacgattggtaggcaattcccgttagacaggcccgcaattgcagctcagaaataccaagatctaataagcgcgcgaccacgccctgtgtactccgagcgtgaatagtactcaataccaggtggccacttaaggccgcagaaattgcatattgagctgtctctaaatcgcgaatttcaccgataatcagcgtatccggtcgcagtcgtaaactaatttttaatagctcggcgtagctcaatcccgcattatcattaacctgcagttgcaaaaactcaggtgcaacaatttcaatcggatcttcaatagcaaccaccatcttggcactcattgattgttgggccagatgatagagactagtcgttttaccagaaccagtcggcccagcgaaaagaattaagcccgcctgtcgactcatctgcgttaattgcgccaagatctgttgatcatcacaatgatagatggcaccaattggatagataaaccgaatgaccaagctttcgcggtttaaaaaatccccgaccgtcgctaggcgtaaataaattgtttgatcggctagctgtaattccgagcggccggtttgcgcacgccgagtctcgctgatatccatccccgccatatacttcagtcgatttaaataacgcgttccagtcggtttatccaattcttgattggtgaccaaatcgctctgacgacgttccgtcaagcgccagccacctattgtcggtgtaaaataaagatcttgaacacgttgtttagcacaatgctttaataaagttgttagcttttcttcagttgacatgccatcacctttcttttaagttgttacttaagattacgctagggatggtcatatttttttgcaaaaaaaataaccttaaaccaacaatattggtttaaggttatttagaataatattattcttcttctggtagttcaccagcagtataaacatcttgaacatcatcgttgtcttccaaagcatcaactaaacgttggaattgttctactttttcaggatcaactggtgttgtattttgtggaatcattgttaattcagcatttgccaaagtgtatttcttttcaagaatatcacggacatttgccaattccttaggatctgtgtaaatttcaaacacatcttcttcggtttgtaaatcatccgcaccagcttctaaaatgtcttcgaacatttgatcttcatcaacatctaagccttcacgtgcaatcgcgatataaccgcgacgatcaaacatgtaagccactgaaccagcagcgcccattgtcccgccattacgagtaaatgcaacacgaacgtctgaacttgtccggttcttattgtcagttaaagcgtgtactaaaacggcaacaccacctggtgcgtagccttcataagtaatttcatcgtagttcgcgccatcgctaccgtcagccttgtcaattgcccgtttgatgttatctttaggcatgttagctgaacgtgctttatccataattaaacgtaatgcggcgttagaacttgggtcaggaccgccacttctcgcagccatgaaaagctcacgggatagtttttggaaaatcttgccgcgttttgcatcttgtgcgtttttacgaccctgaatattatgccattttgaatgtcctgacatatctaactcctcttttcgattatagaattctggtactaagtcgttatctatgatagcaaattatcgactcaaaagcaatggtagtcacgtttatcgtcgttttttgcgacctacaaagtataaaataacactcataatggcaatccctgataaagcgcccacactatcgagcatgacatcttgaaaaagtggtgtccgatcacccgttaacatttggtgaaattcgtcggttgccgcatacccagtcgctgctaaccaactgaaaatccccgctaagaaagcaccttcgattcgggggcgtaatcctaaataactgaataacgctaataagaaatatgtgccgaagtgggcacccttgcgcacaaagaattcgacaaacttaaagtaaccacttgccttaacactttgttcactgcctgcataatggaaggagaattgactcaaccactgcttgagtggttcatttttcaagacgcgttccaaaagtgggacggatgtttgttcatgatacgtcattgatgagctataaaacaaaattgccatcatgacaagtgccaatactaagaaccaatcgctctttttcttaaacatgcttaatcctccgctaattaatctcagattacagtataccaaagttgttccaagcattaaaatcagatatactaccatttgaaagaaggttttaaaatgcccgagcaagatcgtttttaccaacctcaaaacgccaaagatgccatgcgttttgtccaaaaattattcaaccaatacaaccaagcaccactaactgaagaattagtcgcataccatcaaaaattactcgcttatctcaccaatgacgtcaccgttgaagtccaaaaacaaggcaactcagaacaagctgccaaattaaaggacatgattgtcgccatgcaagactggctaaaaattcgtgtcagcgggaaaccttacgccggtaaaatgcaacatttcaagtttatgcctgatcaacaacaaacgacatttaagcaacggacaattaaaggcagcaagcccaacaacctccggacatcgcctcgtcgttaaagacgcttgctattttagctgaaagtgctaaaatattttttgtaagcgtttgggcccgtagctcagttgggagagcgcctgcttcgcatgtaggaggtcgccagttcgaatctggtcgggtccatcaatttaatcccataaaaaagaaccaccaacaataattgttggcggttcttttttactatcttagtcatcataacttactgatgcatcaaactcacttaatctagcagcatcaaccttctcagcatttaaatagtctgtaaacttcgctgatttaataaagcccgtcccgggatttagataaatattgctatcttctcctaaaccaattaattcaacgccatcaatctgttgttcatcttttggtgaaacatcttcaatcgtcgtcagataagcaaaccgaatccccccttgtgtcacgttactatcagtcgctttaattccaaatgcttgggggcgaccccacatacctgctaaactcggtgtccgataggcaattaacgcccacttaccaaaattttctgcattttcaaattggctgataagcggattaactttagtcattgtgcctcgtttttcaagataagttggcgttttggttgctgattcagtcatcactgtacttgttttataagcccctgaatccggtgtttggtacgctgcttccgacccaccgaccgaatccgatagccgcataataagctgattatcataaaccgcaaaattaaagcgttcatcaggcactgacacacttgaccgatcacggtactggttacccgcaacactcaattgactcatgtcataaatatccccctggttatgatcaaaagtaatatgaccctgatcatctaaatggtactgacccgtcatataggctactgaaccagcaccataggaattgtagactgcttgccagttaaaggtaccatcttgattaaaggttagccaaacctgattcttatcaattcggcccataaaattcttaccaccaatcaacttttgcgcgaccactttcggtgttgattgatattgcttagcttgttgtgtcttgaattgatcgaaatcaaccactttagttttcactttatataatttaactttattaattgaaccttctaaatatttaggcgttattttaatttcaattggcttattttcagctgctgttaactgatgttcgtccctatattgatatgcagttggcgttgccttttgtttaagcgcactatcacttgcgtaagtgacttcaactactttttgaattttaatgataatctgttgcgtcttcttattcacctgataggtccccgattcaacaaacttaccagcatatccgttactggcggtaatatcttgccggaatgtaccatcttttttaaagctcattaaataatcataatctggatcttcatgagacttattccccgtataagtcccgtgataagtgccaccgctaacattattttgtgttgtagtttggtgttgtgcgtgactaatctgtttagctaacttcacttggcgactacatgcaaccaatagtaagctagcaaatgccagcagcattactaatttcattttttcattatgacgctcccccttggtcatgaatatgtgttggtgcgattgttgtcgttccaataacccgcatattttttaaatcaacaatttctttttcataatctgttggattggcgcccggaccttctcttataaagccatatacagcaacgtcaccaaagcgtctgatagcgggtgtggcagtgccttgaaagaacaatttataactaccatcactttctaaagttattaccgcatcatcatcaacgccactattacgccagacacgccacattacattcattctttttccaaccaataaattatacagttcaactcccatattcgtatcaataaccgactcactcgtcacctttaaactcggatcctgccccgcaacttctgccttcaactgcgttaattcactacttccagttggtgcagtttccacttttgtggtattcgttgtttgacgcgacgtgctagttgtcgtcttacgacttttttgcgattgaacttcattttgcgcggctgtcttaaaatggttgaacgatatcatcgcatgttttgttggtcgcaactgaacgccattaacacttccctgtaaataattcgacttaattagaatattaatcggtttatcctctgctgctgtcagagccttgcctccttgttgtttacgataatcataactaattggtggctgttgatgggataaatcatattcagtcgcgtaagtgacttccacaacttgctgaatgttaatcacaattttagctgtctgcttatcaattgtgtaggtcccttgctctacaaacttggcataataaccatctgttgcagtaatatcttgtctgaacgtcccatctgctttaaacgccattaaatactcgtagcttgggtccgtcttcgtaccagccccttgataactacccgcaaagttctgtccaataatcttaatccgaccatttttagtagtaggtgacacgacatgttgctctattttttttgcatgcttagtgttgtcctgacaccctactagtcccaccgttagtagtaagaaagcacccattagtaccttgtttttaactctcacctttattcccccagtaaagtatttttacattttactaatcatgtgattagtttaacgcattaattttcttactattaacatggtccgcctaacgatgaaaactatttcttagtggactgtcagatttaactatgccgcgcacaacttaattgttgccaaatcttcgcgaaaacgttatagttatgctaatatttagggggtttttataatgactgataaaatttttacaaaagaaacactcgcacaatataacggtcaagatggccaaccaagttacgttgctgttgaaggtatcgtctatgacctatccgcaatgggaccttgggaaggtggcaaacattttaaaggcttgagagctggacaagacttaacagaagccttcgcaaactcacaccacacacctaaacgacttcaaaatctccctcaaatgggccgctatgaaggttaacaatgactttcatcaaaaaaacaccatcaattctgggcaattgcgtccacattgatggtgtttttttagaataagatcgtaattaataaaatagcagcagcaacttggaaaacgactaacccgccggcataaaataacaattgtttgccttgattaaatagtgtttttaagtttaaccgtaagccgattgcggctaaggcggtcatttcacaccacgtactcaagaaatggcagattattccgaattgacccgggaaaagatgtaggctgttgatcacacaaaagattaaaaagcctaaaacgtaccaaggtactaagctactctttttagccaatagttgttgacttaacttcgtatcggttgcttggctttgtttcttctgatgtaaataaccaaaaccggtcactacaaagactaaacagataattcgtaagattttaaataaggttgctgtgacgacagtgccttgattaatcatggtcgcactggcgaccacttggcccacagattgcaccgtaccaccaattaaaatccctcgagcaagattatcatggccccataacagtgtccctaaaactggcagtgccaacatcaagattgtccccatgagattgaccattgtgatggcaatcccagtatcttcattatccgcatcaatcacgggcgcaatcgccccgattgctgaagaaccgcagactgcattcccaccggccatcaataagtacgtgccttcgctaaagcgcaagcgccggcccaaccagatggcaaagccaattgttaagctcatctgcaagaccgttagaacaaccccttgccagccaattttttgaatactttggaatgtgattgtcgcgcctaataacatcaccgaatattccaagagtcttttttcagaaaatttcgtgcccgcggctaagcccggttgttttaaccaagtattgcctaaaataatgccaacaaataacgcgatggttgcaccacctaacattggtaaccataattgtgcaatatagtagcttccaatcgcgatgaccaatgatacaataaagccaggtaatttcttaatcaatgattgcattttactcgctccctctcaaatcaataagttaactataccgaaactctttcaattaataaaataaatctttataatagttgttattaataattttaatggaagtgatatgatgtttaaaacgctcgaaattttcaagacggtttatgaaactaaaaattttacgactgcggcccaactccttttcctgtcgcaaccaaccgtttcagtgcaaatcaaacaacttgaagagtcgctcgatgttgttttattcgaacgcaatggtcgccaacaaatcgtgcccaccaaacaggcggatttattctacgagcaatgccagcaattactggatttatggcaccaagatctccatcaactacaacatcaagaaaggcaggctaaaatcccctgccggattgctgcttcacacaccacggcggcctacttcttaccggcgttacttagtcgccaccgtgctgctttagatgctttagaaattgaaatctgcacgttaaattcctcgcagattatcgaacagttgtcgcaacacaaattggactttggctttatcgaaaaaccattaacggaaaaagatatcgttcgcacgccgctacaaacggatcaattagttttagccggtcaaccaaccgaaccgtggctcttacgtgaaaatggttctggcgtctatcattacacgatgaattatttaaaggaaaataatttaacgctcgataacgtgatgacggttaaaagtaatgccattatcgtccaattattacgacaaggattaggtcaatcattgatttcaagtgccgcattacttgattatccagagattccctaccgaccgctttccaaacagtaccaacgccaattttacctggttaatcgcaagggtttaccccaaccaatccaggatttcgtcgcgacattactggcgaccccactaccaattgaataggagtgttccactttgacaaactcaccacagattaaaaaagaactgactggttacatcattcgtgatgttttcagttcactcggcctttcaatctatattttggccgatacctacttcatcgcttacgcggttggcccaattggcttagccgcgctcaatatcgatttaccacttttcaacctttttaacggcttaggattgatgctcggtattggtggcgcaacaattttctcaattaataagattaaccatcccgaaaagagtcaggcgattttcactgaagtcctctccttcggcattttattggggctaatcatcatgagtctcggtttaatttttattcatccgctcctccatctactgggtgctaatcatgaaacgctcgggcctagcttggcttacctacgcgttattttaattgggagtccactctttattctcaataatttggttctcagtttcgtgcgaaacgatagcaatccacatctaaccatgattgcgaccctttctcaaagtttattcgtgattatttttgactacttattgatgttcccactacacatgggcatgatgggggcggccctcgcgacgatttgttcgccactagtcagccttttgattttaacgcaacatcgtcatcacccggaacgcttactcaccctcaaaaaactcacgttaaacttcaaaccaacgtttaaagctgtccaattgggttttccttctttcttaaccgaaatgagtaccggcgttagcattttcgtcttcaacatcgttattttgcatttagccgataactacgccgtcgcagcttacggcattattgctaatatcttacttgtcggtttatcgttatttaacggtgttgccgttggggtccaaccaattgtcagccgtgaatttggcaaacgaaactggcataacgttaaaactagtttaagaatcggtttattatcagcactcgggatcgcaactggtctgtatctggtcctgctcgggtttaaagaaccaatcatcgccattttcaaccatgatcacaatcaattactcgttcattacgcggcagctggtattccgttgattttcatcagctttttcttctcaagtatgaatatcgtcaacaacctatttatgacggccattgcccaaccacgactatcatttttcgtcgcgattatgcgtggttacgtcctcctaatcgggagtgtcttattgttatcggccctctttggcctaaccggtgtctggctcagtgtgccgctcaccgaattagtagtcttaatcggcggcttcttcatcacacacagcttattgaacacgcttggtgaataagctaaaaagggtagggacaaaagttatttttgtccctaccctttttcaatattctattttaattttgcactcagtggtttctgcggatcgaccggttgttgcacaattagttcctcaatcaaataaacaatcgtttcattttccggtaaacttgtgtgtttggcatcattaccactcacaaacatcgacatgtaatgggcaatttgattttggaagacttcccgacctgccgcaacgctagaagctgggacaatgccatcatccccaccagtcgttgtgccaccaacggaatagacaaccatttttttagaaaggtgttctttttgagattttaaatccgttaacattgggctttcatctttgatgctggcatttaacccattatagggtgtgccaatcgttaataaacggcttaattgcgcctctttaggatagcgttctgcataccgcgttaatactaacccgccgttagaatagccgacaccgttaaatttcttaaaatggtattgcttagtcagctgttgcattgccttttcaaaccattcagtttgcttaaagacattctcgtccccgtcattattgttttcaaaactgacaacaattaaagggactttatcgcgccaaacaatctggcccttcgttttgacttgaccatccgccatcacttccactttaagaatactatgttggcgataatgttggttaactgttttaaaaagttgatcgaaccgatcattagtgccaccactgccgggtacaaaaacaatcggttggcgatccgctttttgcgggctaaccaggccttgaaccgcaactctagtggtacccagtgtcccaattaccccaccaaggactaaacaaaaaacacaaatcaatactattcttaattttcgcatcctgaaacttctttcttacagcttgtcattaattttagttggtaaaatcatttgaatatccgctggaatcggcgctgtaaactgtcttttctgttgactgaacggatcattaaaggttaattggtacgcatgtaatgcttggcggtcaattccccaaccaagcggtccctcataaagttgatcgccaactaacggatgatctaaatcactcaagtgaacacgaatttgatgtgttcggccggtgtgaatctggacttttaagacagttaagcgctcatcttgtgctaaacgccaataatcagtccaagcactttgtccgtcagcaatcacccgccgacgtggttcaaccccgacacggccaatcggtgctttaatcgtcccaaattcaggtagtccagtccccgcaacaactgctagataaaatttttgcaattgatgttgttcaatctgcggttgaagtaaactttgggccacttggtgtttagccgctaacacaatcccacttgtatcaaaatcaaggcgcgtaataatatggggtactaaatcggtcgccccattttgttgccagtaacctttaatccggttcaacaacgtatctgtcgtattagttggtccagggattgttgccaggccagccggtttgttcacgactaaccagtagtcatcctcatagagcacttcaatcggtactccactgaccgcgaccgtttcgtcggctggttctgcaggtaatgtcagactgacctgatcgccattttgaacttggtcagcgggactgcttaaccgattatttaagcgaaccggtagaccctgcgccttaattttggcatataggcgctgactaatcccattttttagaaggaactgtttcattgtttgtgattgttgtgtggcgacttgccatttaatttccatcacttgttaacctgctttcgaaaactcttacgtttattatacttgtaatacccatttaaattcaatccgctaacccttttagttgccaaaatgtggcggaattcgctatgctagaagtgtagtcaattcaatattggaggttacatctatgacaaaaaatgtagcagttttaattggtagtttacgtaaggattcatttagtaaggcaattgccaaacaattgatgccgttattcccagaagacatgcacttagaggtaattgaaattggtgatctcccactttacaatcaagactatgatgatcttgatcaagtacccgaagcctacacgactttcagaaataaaatgcaacaaatggacgccgtattattcgtcacacctgaatataaccgctccgtaccagccgtcttaaaaaatgctttagacgttggttcacggccttatggtgcgagtgtctgggataacaagcctgctgaaatcgtcagcgtttcaccaggtgccattagcggttttggcgctaaccatcatttacgccaatcactcgttttcctaaacatgccaacagttcaacaacccgaagcttacatcggtaatgtaatgaatctattagacgacaatggccaagttgctaatccagatacaatcgccttcttccaagtgattgttgatgcatttgttacattgattaaccgttatattgactaaaatcataattaattcaaccgtcgatcagttttcgacggtttttttgttcgtttaaaataaatttagttttaattcaaacgattcgtatgctatactaactaatgaatttatgtcattttagatacattttattcatttttgtatctattaagatataaaaactaatatacttattttgggggaaatttttatcatggcaaagaaacaatattcattaacattaatcggcctgggcctagcggtattaggtttcgttttttcgtttctagcagattctgaattgggactcatcataccatcactacttgaaattgcaggattcgttttatcaattattggaacggttaagaaggatcacaaaaaattagcgattaccggcattgtagtaactagtttattacttttgattttcatactagaatctgttgctaataacgaaattgaaaaggaccaatatcaacaagaacatcccatttcatctttaatgcaacaataaatagccaatcaaaaagcccttctaaaatcagatttcgattttagaggggctttttctaatcattaccacttagtcgcattccagatacggccgtccagttcaccctgacgttgttcaatccgagttgctaatgcttgattgagttctgcgagcgcttcatagaaagcttgatcctcatacgtggttgcttgttgtttgagcatttgaatttgttggtttaaccattcttcatttgtcattaaccttcgccttcttcctggcgaatcagttgcacttgccaacctaaatcagttaacaattcaccttgttctgtcaactgatcagccaataacgcaagctgctgctgctgctctgaatcagtcgcagccgattggcgttgtcgcaactgctgttcaaaccacgccaccttttgttcaaagttaaaagtggtttgcgttaaataccgctgataatcaactaataataattggcgggctgtttcagttaaataactaaattgatgaatcgcaaatggtggtaagtaggtcattcctaattttcgtgcaaccaattcatatggccgtagaatttcagaaagcgttgcttgctcgctgccaccagcttgaaaatgtttaccagcaatccctgtcgagacaacaacccccaacgatttcccttgtagaggcatccgcccgctaaatgcaaattcaccagttaaaacagtatctaaccacgttttgagactagccggtgcagcataccaatagagcggaaattggaaaatgatccgctcatggtcacgtaataaagcttgctctgcggcgacatccagctgttgaatggttgctaaatcgtgccaagtcacttcatcttgaaacggcatcgcactcgccttcagaaaattctgaacaagcgaattagccatctcaggatgactgacaatcactaatgttttcatacactgccaactttctatttctaaaagttcattgtacaaaaattagcttcaaattgcgactaatagagttccaaatattgctcacgttcccattcagaaacttgttgacgataagctgcccattctaatgacttagaatccatgaaactttgatagagataagtacccattgaatccttaataatatcatctttagctagttctttaagtgcattgtgcaaggttgatggtaaatcagtaatatgattttccttccgttctgtttcatccatgctgtaaatgttacgatcaacaccggcttctggtgaaaggccttgttctaaccctgataaaccagctgctaagattgaactgattgcaagatatgggtttgcactggggtcaacactccgcaattcaagacgcgttgataaaccacgtgattgtggtactcggattaatggtgaacggttatggcctgaccaagccacataaacgggtgcttcaaagccaggtaccaagcgtttgtatgaattaacagttggattgttgatggccgtaatcgcacgagcatggcgtaataagcctgctaagaagtgataggctgtttctgataattgttctttgccattttcatcgaagaaggcgtttgtcccatcttggttgaataatgacatgttgatgtgcatccctgagccattgacaccgtgtaatggttttggcataaaggttgcgtgaagcccatgtttacgggcaattgttttaacgactaatttgaaggtttgaatattatcggctgcatcgactgcatcggcatacttgaaatcaatttcatgttggccaggtgcaacttcatgatgactggcttcaacttcaaagcccatcttttcaagttccaaaacgatatcccgacgacagttttcgcccaaatcaacaggggcaaaatcgaaatagccaccttgatcgtttaattttaaggttggtttgccaatttcatctaatttaaagaggaagaattctggttcaggcccgatgttaaaatctttgaagcctttatcttgcatttcgcgaaccatttttttcaagttattgcgaggatcacctaagaatggttccccatcagcagtgtaaacggaacagattaaacgggctactttgccatgttcagcttcccatgggaaaatcaaccaagtacttaaatcaggacgcaaatacatatcactttcttcaattcgaacaaaaccgtcgattgaagaaccatcaaacatcattttgttacttaaaactttgtctaattgactgattgggacttccacattcttgataatcccattaatatccgtaaacattaatcttaagaacttaacgttttcttgatccactaattgcttgattgcttctgctgtcaacatttttcgtgccattaatctagtcgccccttaatataatttagatgattgtgaaatagatggtcgttgtcctactaatccgccgaccgaaagcatttcttccgctaacaattgacgggccttggtatcggtcagatgccgctgttgcattttttgtgcttgcttgcggtagatctggcgaatttgaaccatcgtggcgccttctactaagtaatccttaatctctaataagcgatcaacatcattcagcgaaaataaccgttggtgccccggcgtacgttcaggcaaaacaagttcttgactctcatagtaacggatttgacgcgccgtttgaccggttaacttcatcaccgttccaatcggtaaaaccgctaaatttcgtcttaattgcttttcagccatctatttcacctcacttgcgttttatcttaccagtcgacttcttaccggtcaacatttcatgttaggttttctgacatgaatgccataaaaaaaggtaaaccgttttggtttaccttttaaaagctatttttcatcaatcaactggattaaaccgcccgcaagcataaataaatgcgtaacgacgggtcccacaaatttaaagccccgtttctttaagtctttggcaagtcgggcactaattggcgctgatttatcggagaccccagccatttgtgaatcaagtaattgaggttgattgtcaacaaacgcccacaagtacgctgagaaactactgaactcatcctgcactttttgaatcgcccgcgcattctggatggtggcgcgaatctttcttgtattgtgaatcatatccggtgcttcttgaagtcgttcaacatcaaattcatcaaattgtgcaacccgatcaatcaccattcccgccatttgttgccgtaaaattggaattttactagcggctactttccaacttaaacccacctggaaaacaccaaccgttaagagttcaaaccaaatttgatcatcatcagttggcgtcccaaaatagcaatgataagcttgaacgccatctgtcgctattttaaaatcatttttcgttgtctcatctaccatcgataaaccgcctgtcctgcactttctgttggaaagcccactttcttcgctaattcgctgtaatgcgtttctaaataatcgtaacacgctgtcgtgtcatgggccatgaaaaacggtagtacccccatcgaatcatcaaattgaatgtgttcctcttgcgcataggccttcaagacttttgccaactgataaaagtcttgattggttacataatatggcactaaggattgttttgtatcaatagtgacaatggcgcgataagcgtgaccgatacctggtagtcccccaatccccgctgttggtccagcagtttggaagactgcataatgaacagcacgaattgccgttgttgccaattgcttaaccatcttcgtggccatcacttttaaataatccgtctgtttcaaactgatttgatgtggtgctaacgttattaaataaggcgtccgtgtttgccgccaatgtgtcggcatcgtttgcccgtccctgataacagcgacatctgtcaacgtttcactaaactgttgccttaagtcaacatagtaccgctctggtttttggataagctgtcccaaagcggataacggcactgtttcttccgtttcagataaatgccaatgctgtcgtaatcgcgttaacagcgaacctgatttggtaactgtttcaacgtctaacagctcgttcaagctcacgttataaagttgtgcaagtccgactaataagttcaaatccggtacacttttgtcggtttcccacttagaaataacttggcgtgaaacattaagtttatccgcaagcgtctgttgtgaataccccgcacctaatcgaaattgttttaagcgctgaccaattaacatctaaccacctccaagacctaccgtagcgaaaaccgccttttttcaccagcaacaatctgaagcaatggttaaatcagaccgctacgattcgttgcacccttatcataccacgctttacatacaaaaaaagcggtgaatcaaacgtcaatttgattcaccgctacctatttatttttcaaagaatgttgtttgcactgcccgactaatggcgagtttaacgtgcgcataagttaaaccaccttgtaaataaagcgtgtaaggtgcccgcaatggtccgtcagctgaaaattcgatgctggcgccttgaataaaggtgccggcagccatcacgatttgatcttcgtatccggcaaagtcacttggaattggcgtgacgaaagaatcgattggtgattgtgcttgtacacaacccgcaaacttaaccatgtcatcagggttaccaaagttaactgtttgaattaaatcggttctaggggcatcccattttggcgaaacgttcaagcccatttgttccaaaagcgctgcttcaaaaacagcccctttgatggcatttcctgtaacacttggcgctaagaaaaagccttcgaacattaattgtaagttaccttgtgtggccccttcactggcaccaacacctggcaccgttaagcgataaccaatcatttcaatcaagcgttctggcccaacaatgtaaccacctgtttgggcaatcccaccaccagcatttttaatcaatgaaccggccatgacatccgcgccgacttccgttggttcgattgtttctgagaattcgccgtaagcattatcaacgaagacaatcaattcgggattaatccccttgataaaacgcaccatctcttcaattttagcaaccgtaaaactatcgcgatcggcataaccacgtgaacgttgaatcgcaacgactttcgttttagccgtgatcttcgtcttagctgtttcaaaatcgaccgagccatctgccaataatggcacgtaatcaaagccaatttgatattccttcatcgaaccaataccgttaccggccatcccgacaacttcttggagcgtatcgtaaggttctccggtcagatagagcaaatcatctccagggcgtaacatgcccaataaagctgttccaatcgcatgtgtgccagaaaccagttgtggccgaacaagggcgtcttcggtcttaaaaaagcgactatagaccgcttctaacttatcacgtccttggtcatcgttcccataacccgttgttccatttaaatgtgattctgaaatattttcttcttgaaaggcttgcagaacctttgcttgattattaatgatttgttcatctaaggcttgaagccgtggcgcaatttgagcgttaacagcttcaattttggcccgtaattctggtgctaacgaatcttgccaattcatattattcactccgtttccactatttctgtaaccaggtttggatatctgcttggatgcgcgctaagtctgcttcttgatgctcgactagattataccagttaacaggaatttggtttctaaaccacgttaattgccgttttgcataatggcgcgagttttgcttcacttgctcgattgctgcttctagtgaacactcaccatcaaagtacgggaagaattccttataaccaatgccgcgaactgcttgcggacttgttgtacggcgttcataagcccatcttgcttcttcaattaatccggcgtccaccatttggtcaacacgctggttaatccgctcgtacaagacaggacgctcgcaattcaagccaataataaaggtatcatagcgcaactccttaggcttttgttgcgagaataaaacacccgttgtttcataaacttctaacgcccgaataacgcgacgcgtattggccgctggaatttttgccgcagcatctggatcaatcttagccagcgcctgccataaatcagtttctgaatgctgttctaagtatgcttgccatttattgcgaatactgaaatcctgttcagcatccgttgcacttcccagcgtcatatcatacaacaaagcttgcaaataaagacctgtcccaccaacaatcaacggtagatgttgacggtcagtaatttttgtaatcaactgttggccttgttgttgaaagtcaaaagccgtgaaacgttcatcaatatcagcgacatcgattaaatgatgcggcgcaatggcttgttctgccggcgttactttggccgtaccgatatcaagatgacggtaaacttgcatcgcgtctccagaaataatttcgcccttcaactgttgtgccacttgtaggctaagtgccgtcttaccaacacccgtaggccctacaatgacaattatcttttcttttttcattatttcaccacactaattaacgtattttactagctattcgcgcctaaatacgcgataatgaacatatagtttgaatgaatgattgaggaggttttacgatgaaacataaattttttaaaggtttcgtaatcgggactgtttctactgttggtgcgattgccggttcactctttgcatttaagaaaaccgtgttagatcctatcgaagaagaagaaaataaaatcgaagaaaatcgtcgtcgcgctaaccgtaagagccattcagctcaccaaggctaagcgattaaagatgatcacaagacgctgccctacttttgtagatggcgtctttttttgtgctgaaacgtgcttttcaaagctgcctcctgtgctttgctacgtaccgcaaacaatcgactagcgtcgtttattcacgatactaggcaaatgctcagagtcaaatcgctttgaaaagcactctttttcatataaaaacccaaaagtctgctgtttttcactggcgacttttgggtctttttttaatctactttttacgttttgtttttcctgtccagttgttaaaacctttttgaagccatttaacgttcgtaaaacctgctttgcgaagttttaatgctgcacgaacgcttaatgtaatgcctgtatcatagaggtaaactggcaaatccattcgtaattcacccatgttttgtttcaacattgggtaaggaatgctccgagcacctaagatatggccagcatcgaaatccttgcgttcacgcaaatcaacgatttgggctttacgcatgttttcttcaaatgccttttcagtcagttcgccgcctagacgcttacgttggattttatagtaaacccacacgccaattatccataacaaaatagcgatcaagataatattaacaacaaacattggattaattgtcccgattacaaacatctacaaaacttcctttttaacagattattgttggtcaaattgtaaagctaatgaagcagcaccgataacaccggcaacgttacctaagttagctaaacgaaccttcgttgtttgtttaacatttgggaatgtaaattcttcaaagtaagcttcaacttgtttacgtaagaattcaccagcagctgaaacaccaccaccgataacgatgtaggctgggttcaacatgttaccaacgttagctaaagctaaaccaaggtagtatgacacgcggtcaaccactttgacagccaaaggatctgattccttagccaagtcgaaaacaagttttgaactgatttgttcgccatcatctaacattgttttcaattttgaattaccagcatattcttcagccatgtcacgcgcaacacgcacaacacctgttgctgaagcataagtttctaaacaaccttttttaccacaagtacattcgtaaccgcgtggttcaacagtcacgtgacctaattcaccggcagaaccagcaacaccgtgtagtaaatgaccatcagcaacgatcccgccaccgacaccagtaccaagtgtcacgaaagcaacgtcaggttggttttcaccagcacccttccagcgttcgcctaaagcggctacattggcatcattatcaactgctagtttcatatgtgtgccagcttcaatatcgcgacgtaagtattgcgttactttccagtttaagttgaaggcaccaataacagtaccttcttcactgttaacactaccaggtgttcccataccgattccgatgaaatcttctggtgtcatgttgtataaatctaaatgatgattaatcgattcaacgatatcgggcacaatgtggctaccttcatctaaaatatctgtatcgatactccaacgttgttgaatgtcgccatccactgtcataattgcaaatttagccgttgtaccacctaagtcaacgccgattaacttcttgtctgtcatttaaacttttcctccaataattcatgattgaatgtttgtttttcttccaaccgatgttcatgtactagcaccatcttagcgtcgcgatacactttaccatcgattaaaccagcatcatagacatgacgtaactcgatactcgttagctcaatatcccaaagtcgcttaccaacatggacataaacaccaaattgttttaaaagttgttgtacatcataaagtgttctcatcaacttcacctatcatattatacctaaatttattaacgattcatacccaagtagacaaataaaatgagggtaatgacgtaaattaacccactaaccacacggtttagcgggttaattttcccgatacgtggtgcgccaagtgccatactacttaaaaagccacctaaaataccgccaaccatcccgtacatcgcattgcgattaacgacaaattgtaatccggctgttaaaaataggaataaccaatactggcgcgcaatctgaccaaaaactggattatctttgaacgcatcaccaagcattaaaaaaccaccaaaaatcccaagaacagctaagcccgctgtaatcgtttgcgaacctgttcctaagaaaaggccttgtgtgattaaacttgctaaactactgagtatatagattgctaataagcgccaatgaccaattaatgattctaattggctcccgacaaaatataaaataacacaatccattaagagacttaaaaaactaatatggttaattgaagccattaaaaatgggacaacaccacctgccagcaagccttgcaccgacgtaattccctgcgcccaaatcattggtgcaacaaacattaacccaaaataaaggacgttcatgataatcaaagcataagcgacaaatggtatttctcgccaatctttggtagtatgatttactttcatctcttctccttcttaagccgtaataatgtgctttagtttaacatcaaattgatcaactgaccaatcaggcaccttcacttgttgtggctttaaagcgagtgcaacagtgttcatatgatgagctgccagatagcgatcataatacccaccaccaaaaccaacacgccaaccgtctagactaaagacaacccctggcacaatcattaagtccggcacaattggctcaccagttatctgcggctctaagacgccaaaatgacttctctcaaggaccgttgttggtgtcaactcataaaaggccatctgacgcttaggcaaggttctgggcactacaatccgcttaccagccgcttgtgcagcctcaataatcggttgcgttgcgacttcaatcggttgattaagcgtcattccaatcacggttgcggattgaaaagccgcactgtcaattaatttttgtaacaagattgcttcttgttgttgcttgttagcgggttgttgggctaaacgctgtaacgctgccaaaccctgttgtcggacttgttgcttagtttgcacgaagacccctcctaacaaaaaaagcccgggcaagcgccccggctttttttatgcgtcactatttagtttcgcgatgtaaagttactttgcgttcgcgtgggcaatatttctttaattccaagcgatctggattgttacgtttatttttgtttgataagtaactacgttcgtgacattctgtacattccattgtaatgtgaacacgcattgatatagcctccaagctgtaagtaaatttctaaaaaactgtttaattcttagactcttagtatcataccattttttctagtatctgaaaaggttaattcgcaatatttcattttgaaatattatttaatttatagtaatcggtaatcatttcacgcgccaacaaggtattgtagtgcccttcatcggatgtcaagttagggaaaacaatcgcgatggcgacttgtggatcattatatggggcgaacccaacaagacttgatgtgacggtttccacttgcttgctagttgaatcattaggatcttcgcgtgcgaatgattgcgccgtccctgtttttgcgccaaaggttggtttgatatctttcaaggtgtgcgctgtcccccaggcattagtcccgttgacaacgttgtacatcccttctttaaccacattaaagtacgattttggtgcgttaatcgtgtttaagaccgttggactagttttagattcgagtttacctagatttccatccgtccctgtttgttggatggaatccaccaaataaggtttcatccggttaccaccgttggcaattgttgaaatatattgtgccaattgaattaaggtataggcatcgtagttcccgtaggataaatccagtgcggaaccaacagctggtaaaccagcatccgttaaggttggcccttcaatcccttttgcttcacctggtaaatcgataccggttttttggcctaaaccaaattgattaaagtacccgcgcattttcgtaaagatatccggtgaaatattgatttttttattgggaatgtactcagctttcccttcacgtaatgccaattgcatcatgtaaatattggaagaaacttctaaggctgattgtgctgataatgacccgaaagtccccactgggtaaacggatttcttaactggggtacttggtaaataaattggcgtatctggcaaggtattattacttggtgaaataacaccgtccatcatcccgcccatcactgtggcccctttgacagcagaccccatgacgaaggtgcgattgataacccctagcgcgtcatcgctggcttgcttagtagtacggtcgttttgttcaccagccatcgctaaaatcgcgccggtctttggattcatcgcaaccgcgtaagcaccatcagagtatgtcgttgcgccagcagcaaccgctttggcgtagattttcttcaaagctgcttcgacttttgtttggtaagcttgatcgatggttaagtttaagttactccctttttggcccttgaagagcactttgcttgagagaatttgattgttattaccaacttctacttgggtttgtgatttagaaccatgcaaaatactttcgtattgcttttctaaataactggtcccaacccggtcgtttcgtgaataaccttgagctagtaacgaattaatcccgtcttctggtaatccttgttcttctgttgaaacatgcccgataatactgcgcattgaatcaccattaggatatgagcgttcccaatcggtcccaacattgatcccaggtaaactggttaaatgttcactaatttcagcaatttctttatccgttacattgtcattcttgatgtaaactgttgagagttgataagcaccactcatgattttaaaaatcgctgcggcttgtttttgcttatctgataagccagtaaatgacttttcaacaagatcaattgttgattgataaaccgtcttatccggaattttagaaccgtcagccgctacttttttagattttggtaggcgagcattccattttttaagattcttcggattgctgaggtaataatcaatctgatcacgttccgtcaacgtatccaacttatcgatggttagatatttcgttaactgattggcctccgcatacattttatccgccaagacgttcatattcttcgtatacgtaatggctgatttagcactattgccgaccaacacacgccccttggcatctaaaaccatcccacgagggacattgcccgtcacgatttttttatcggtactattaaccatcgcctgataactcgcaccatttaaaacttgcaagcgccccagttgaataatcaaggctgcaaataatgcaaaaacgataaaaaataggaagttaagtctgaatggaatatgggatctctcccggtttctcttggtttttttcttcataattttcacggacaatcagttactccttattattaggctttttggaaaagccttgcgattctttatttaaatcttaataaaataagattgttgtacatagcatatgcttcattggttaagtttagcaaaattatccataacaagctatgcccaatctctaaattcaagtgagattatggtatcctaaagaggattaacattactgttatattttacagcttttcatcattaaaagctgttcatcaaactaatttttagatttttttattaattggaggtttctcgtgactcgattatacacttttttacgacgccactacgcgttaggccttagcttcttactcccttttgccattatttttatttatggcttaagtcgccacgtctttccatttggcggacagacaattatgacggttgatttagggcaacaatacatcgatttttttgcctattttagaacgaccttacttcagcatcccgataccttcttttattcatttgccaagggacttggcggtgatatgctcggcgtttgggcctactatttaatgagcccgtttaacctactcgtcttattgacgcctggtaaatggttgagctttggcgtttggctaatggtattgctcaaatacggttttagtgggttgagttttgcctattatctcaagaaaagtcgtctactaagtggttggtggctgccaacactcagtctagcctatgcattatctggctttgcaattgccaaccaatttaacgtgatgtggttagacgccatgatttggttgccactagtcgttttaggcatcgaacaactctttgagcgccatcgtttttggttatacccacttagcttagcggccttattgattattaactattatatgggctacatggtttgcttatttgtgattgcttattttttctgggcgagtgtccatcattttaaaacttggcgccaaacttgcctcgcctatctcaaatttgccggtggttcaattctagctggcttgttagcggcttggctgttattaccgactttcttccaattaacacaaagtaagggccaatatacgattcaaaagattcactggaaaattgaatataatcccctcaagattctctctaaattggtggttgggaatttcaatttcgatcagatgccaaaaggcgaacctaacattttcgttggcagtcttgttttaattggttttatcgcctatttcctaacccgcagcattccgattaaagaacgactggccgcattactagtgactggttttctcggattatcactgtgctttgaaccactcgatttactctggcacggcatgcaattcccagtttggtacccttatcgcttctcttacgtgattagtttctggctaattgtcttagctgttcagcgattgcattatcagccacagtttaagtggtacagtttgctagcaccacttttactactagcggcatcacttgcttatactttcaaacacgtcaaaacattttcggcgttatctgaacgacaagtactccttagcgttggttttttaatcgcggtcagcttaattttaatgttgccagcacgcttcaaacgctatactaccgtctttttattactggttaccggcggcgaaatgaccgccaatgcagttctcagcttgaatcaaattagctacgtttcacaaaaggattacgctgattacaccgaacaactgcaatcagcagtcgccgccgtccctaataaggtgccattccaacggattggtaaaacgttcatgcggactaaaaatgatccgatgcaagccaattattttggcggttcccactttaattcgatgttagaaccaagctatcctaaattcatgggcagtatcggtgaacctgccggtgacggttccgtggctgataccaatcaaacgatgttcaccgacgctttactaggttatcgctattacctcaacagtaccagtgttcaagcaaccgtgccgcgcagtaccaacaaacccgacttaagtgactatcgccaaatcaagcaaaacggccagattgccatttatcaaaatgataatgcgttaccactcggttttgcggcttctgataaagtgcttaagcataaagtcacggcggactatccaattcttgaacaggggaacattgcaaccaagctaacggataatccaacacttggcaatcaattatttacccttcaatatttcaacaccgtttcttatcaaaatactaaacaaaaaccgaagttaaacgaaaccttcctccgcatcaattctaaaaaagatgcgcacgtgacctacaccttcacaccgacgacgaatgacccttactatttaacactgggctcaagtctcgagaagaatgctgtgcgcttgacgttaaacggtcaaccgattacgcaatacgatacctttagagatacggttgcacttaacttgactaacaaggcactcgggaaaccacagacattagacatcgccttttcaaaggatgaaatttggcttcaaaacatcaatctctacagtcttaacttggaaacattaagcaagattacaacacaattaaaacaatcaccgttacacatcaaacacttttcaaatacccatatcagcggtgatatcacgatcaagcacaaggatcaggtcttaatgacgacgattccttatgaccctggctggcaagtaacggtcgataaccaccccgtgaaggcggtcaaagggctcaagaacttcatcgcggttccattaaaagcgggtcatcaccaaattgaactgacttaccggccaccttatttcaaactagggcttctaatctcagtggtatcaggactaatggcaatcttaattgcgattataacgcgctattttagaagaagacgactattttaaaaaaagaagagtgtggcataagtcgggtatattctgaggattaacagagagcggcggataattgcgttagcaattattcgtcgttcggcgttaaccgcaggaatatgacttatagaacacgtttagacaaatcatatttaaacagaataaaaagacgttcgggcaaaattaattttgcctgaacgtctttttattctgtatccgtgtccgctaagatcaacgcattttcagcgtagttaatatctttgcgtaactcatccgccaattcccatgaaatcttatgctgttccaataattcttgaatcgcaagtcgttcactcgttagcgccttgattcgtaatttttgtagttgttgttcgtaaatatccgtcttcgtatggccgatatttttcatattttcaatttgattccggtaacgaataataatttgataaataacttgccggttataatgatgctgccggttctcaggttgtttcaagaaatacgacagttgtttgatgcccgctttagccatttccttttcggtcgttcgccattcagtgagcgcttctgtcgatttctgcgatgtttttaatctcgctatcaatcgcttcaacatcgtcaaacctctataaaacatcaattggacatgacgccaactgaaattactgccaatcaccgacaaagcaatttgcttttgccgtaatttccgtttaccacgacggtaagttttggccgtaatttcaccatcagaccacagtgtttctaatttttgccgttccccttcaaaagcgacctgccgcaaaattaattcttctgcaatcaacggtggtaattcatcgccttctgtctgctcgttttgttgattttcaaaacggcgcatcattagttgatattcagcaattaaatctagtgccgctcgattattttcaatatgacgcagcgattcaaccgtcccaactgccacacgatacatatagattttggcatcaaattcactcagcaattgatcatcaactggtacgagtcccgtctcatcacttgtatcttcatgggcagtcccccgtaattcaatcggcgttctcaccttggttaatattgggataaagacaatcgccatcaccaagctaacgataatgacgccggctgcaataaatagcattaaaccgcgttctggaaatggtgacccatcagcaagcacagtcggtacagaaagcaccccggccatcgtaatggctcctcgcacacctgaaagccctgaaaggactgaaattttaaggttatcttttaattgcttcggattcgatttgttagtgtacaacaagtaacttaatgtccaacaggttcgaattagaattagaattccccaaaccgctaataccaagagaatttcttctcccgtattaatcagtggactatgcaccgtccccctcatcgcaactggtaattcaatccctaagattaaaaagacaaggccattcaataaataaacaccaatcgaccaagtttgttccgtcactaattttagttctggtaaataatccaagtaaatattgcgacttgcgtgactaataatcccagccacaaccacggcaatcacacctgaggcatggagtaaatcttcaaccactagataaatcacaaagggggtaatcaactgcaagacggtgtggaaaacaacatcttcaatcccctgttgcaacataaacagtcgaataaaatgaattgcatacatcaacaacatcccagcaattgcgccaacaatactgatgtataagaaatcaccggcagcttgttgaatcgagaagtagccagttaccgcagcggcaatcccgtatttaaaactaatcaagccactggcatcgttaattaaactttcgccactaaccaaatgtaaaacccgtggcggcaagtcggcctgttctgaaatcgactggaccgccatcggatccgttggtgataaaatagcggctaatgcaaaactcgccgccaatggcaacttaggcactagcaaatgaatcgctaagcccccaatcaatgtggtgacaaatactaagaaaatcgcgtttccaataatcggtcctcgcagtgcccataattcccgtttaggaaaccggcggccgtcgttaaacaacaacggcgcgacaaacactaacataaaccaatctgtttttaatggaatctcaactgaaaaaagtagtgccaccagcaagcccaacccaatttcaatcaggctgaccggtagtcgtggtacatagtgaccgatgatattagcgacaatcaacagcatcactaacaaaataacagcttcaatgatagccatctaaatccctcactttcatgcaaaaataggggtcgtacaatgactggcccccattttcactattctgattttttaccgataattcgcacttctggttcaaggcgaacttcgaatttgtgccaaattgtttcttgaatatacgcaattaacgttaaataatcagtggcagttgcgccgccacgattaacaataaaaccagcgtgtttttctgaaacttgtgcgccaccaatttgatgtccttgaaggcctgctttttgaattaaaggccccacaaaatggcccactggtcgtttgaagacactcccacatgaagggtattccaatggttgtttagcagcgcgtaatgcgtttaactcatccattttctcgcggatggttggtgcaacacctttagccatttcaaaacgggctgacaatacaatactcccattttcttggattaaactatgccggtagctgaaatttaattcggcgttcgttaacgtttcaatttcattatcctgcgttaaaatttcggcagatgttaagacatcactaatctcaccaccgtatgccccagcattcatgaatactgcgcccccgacgcttccaggaatcccagccgcaaattctaaccccgtcaaactaccactataggcagcctcagaggtttggataatcccagctccggcttgtgcaaccacagttgtgccctgcacatcgatttgatccatggcggtcaagataatcactaagccactaatcccatcatcacggacgattaaattactagcattcccgatcacagtaattggtaattgattctgcttagcggctactaataattggcgcacttcaggaactgacgttggtaaggctaataaatcagccggaccaccggttttggtgaaggtatatttacttaaaggttcattggttttaacattaattgtttgatttgcttctaaaaatgcgttgatttgacttaacacggctgtcgttcctctcaaataatcttattctagtttaacaaagtagaccgtaattgaacagtcaacacttcttttgcgtaattactcgtagaccgttaaaatataggatagaaacgaggcgaagcgctatgaaatttatctcttggaatgttaatggcttacgagccgttttaaaaaaggattttatgactacctttgaacaattagatgccgattttttctgtctacaagaaacaaaaatgcaagctggtcaagttgaacttgatctacctggctaccatcaatactttaattatgccgagaaaaaaggttattctggtacggctattttcacgaaacacgaaccactcaatgtcacttacggtattcaacaacctgaacatgaccatgagggccgtgtaattacattagaataccctcaatttttcttgatcacttgctacacccctaattcgcaaaatcaattaaaacggttagattaccgcatgacttgggaaaacgcatttagagcttacgtgcaacaactaggtacgcaaaagccagttattttctgcggtgatttaaacgtggctcatgaagcaattgatttgaaaaacgatcgaaccaaccacaagagtgctggtttttccgatgaagaacgggcccaaatgacgacccttcttcaatcaggattcacagacactttccgttatttctatcccgaccaaaccgatatttattcatggtggagttatcgattccatgcgcgtgataacaatgccggttggcggattgactatttcatcacttctgacgagctccaaccaaaattaatggatgccaaaatccatacggaaatctatggttcagatcattgtcccgtagaacttgacacacaagatttattcgcttagaataagcaaacttcaaataaagcgaggtagaaacagtgaatttcgttgcaatggattttgaaaccgccaatggtcaacgcgacagtgcttgttcaattgcactagtcgttgttcgtaacgaccaaattgtcgatcaattttacacccttattaaacccgaaacttattttagtagccgtaatagccagattcacggtatttatgaagaagatgtggcccaagcccctaagtttgatcaagtttggccacacatcgcaccttttttcacaccgcaaaaattagttgtggcgcacaatgcgacctttgatatcggtgtccttcgtagcacactccaacactacgacatcccagaaccccactatttggccctcgataccttaacaactagtcgccggctttatccccaatttgaaaaccataagttaaatacattatgtaccaacttagaaattccactcgaaaatcaccacaatgcgctagctgacagtatcgcatgcgccaaaattctgattaaagaagcacaagagtttggtacagacccactaaaacaagtcacaaaaataatcggctagagtgccgttcaaagcggtttaacttcgagtacttgcatagtgttgtgagtaagcgactttagtcgattatttgcaatacgtagcaagatggagaagttagctttgaacgcacgttttaaatagtgtgcccttcaaagcggtttaatcctaccaacaaaagaggctatcagtaactgaaatggttactgatagcctctttattagcaatggtggattaaagctaaatcaacattaaggtgtgtcattaatacatttaatcattagcaatcgcactaatgattaaatagctttttatccactaataattgtaccacatttactttactacgttaacttattttttgctgattccccggcgatttccaaaactaagaatgaaaactgtactgatcaccaacaagcccccgatgacttcccaatgattgaaactcgtttttaaaaataacactgtcccaattgtcgcagctaacggttcaaaagtattcaataaaccggctgttgtgggggtaatgtaattcaagctccctaaaaagcaaaggttagccaaagctgtcccaaaaatggcaataaataacacactgatgattgtgggcatgttcattggtggtgcatccacccaaaatggatgaatcacattaaataacacgcctccaattagcattgcccaggccacaatcaccaacgtatcatacttctgaaataatttacctgggattaacgtatttaatgcacctgagaaaccaagacacaagcccaagcctaatgctgcgcatgaaatcgataactgagtgagttgccccttagtgaccaataaccaagtccccaataaagcgacaatcacagctattaattcggttcggctaggtgtcttatgatagatcacaagactgataatgataatcatgacggtccctaattgttgtaaaatcgtcgtagtcggtgcgttgctagcttgaatcgttaaaaaataagcgtactggacagccgataatcctaaaatagcaaaagccaatagtcgcccagcatctcgcggttgccgccaaactgctgtgacagttttcggttgcttactgaatgcataacctaataagaagagccctgataaccccattttgacgcccatcaaccactctggtgcaattggtgtatctgtaaatagccattgtgatactggcccctgaataccccaaaaaattgagcctaaaattgctaaatagatcccttttctccgttgttgtatcacgtttaaatctcctactctatattaatcaagcgcaccatttgcaatactggcagcatgccaactgccggatcataatagcccgcttctagtttggcctcaatttgaaaaccaaattgctgataaagttgaatcgcaccttggttacgtgcttgaactgttaatacgattcggcgcggttgtccactagcgctggttgcttgtaatagtgcgtctaacaattgtgtgccaattttttgtcgccagtatgtttttaaaacggcaacacttatttcgccaatgtgttgcaagcctggttcgggttcactcacaagccgagcagccccgacaatcttagccccatcaactgccacccataaagcatcagttgaactatcaagcacggctcgtaacgtcagttcgcaaaacgcctcagacatcgccaagttttccgctgcaatcggtaaaaatggcgtttcctgtaccacttggtttaaaaaacataaataagcccgtgcatccgttacctgcacaggccgaattactaaagatttagttgtcaaaactagcctcgaccaaggctgtatagcgtgtgccatgcggttcaaaaacaagtgtccgcatttgatcgtcgtcatcatttttattgaaatgaatcgtcaagtagtcacttggtaattcatcagcaataaattgactccattcaatgactgaaacaccatccccatcaaaatattcctctaaaccaagatcactggcgccggtttcttctaaccgataaacatccatatgataaagtggaatccggccatctgggtattctcgaatcaaagtaaacgtgggacttttgatataccgtttaatatccaaaccttccgctaatcccttagtgaaagttgttttaccggcacccaaatcaccatcgagtagtaaaacatcgcctgcttgcaattggcggcctaattttttagcaatcgtaatcgtttcttctggttgcgttgtttgaaattctaacataattcgcctcattctattgactctttgtctgcattataccgaaaaataacaagtgaggaaagcattgctatccgaagattccaaaaaagcaaacataaagaggcttaagataacgtcaccattatcctaagcctctttgattaaatgctaagacattctagttttgtaatgcttgggcagctgtgatgatggctaacttgtagacatcttcttcattgctcccgcgtgataaatctgagattggtttgttcaagccttgtaggattggaccgattgcttcgaagttaccgaaacgttgggcaatcttgtagccaatgttccctgattgcaattctgggaatacgaagacgttggcttgaccagcgacttttgaatctggtgctttttggttagcaactactgggacataagcggcatcgaattgtaattcaccgtcgatgtctaagtcaggtgctaattctttggcaatcttcgttgcttcttggacttttgtcacttcttcaccacgggcagaacccattgttgagaagctcaaaagtgccactttaggatcaatatcaaataattcagcagtgcgtgctgaagccactgcaatttctgctaattcttgtgcatttggattgatgttgatcgcacagtctgagaataaataacgttcattgtcgcgaccgcgttgcatgatgaaggccccacttgtccgttggatgccgggttttgttttaataatttgaagagctggacggactgtatcaccggttgagtgaacagcacctgagaccatcccgtcggccaaatcaagataaaccatcattgtgccaaagtaattaggatcttgtaaaatagtttgggcttgttccgccgttgctttacctttacgacgttcaacaaaagctgctaccattgtgtcaaaatctgcttgaggatacgctttaggatcaataattgtaatccctgtgaggttaaaccctttggcagatgcaatgctttgaatatcagctgcatccccgattaaaattggttttaaaattcgatcagcatttaaacgggctgctgcaccaataattctaggttctgttccttcaggaaaaacaatcttaaaatcatgactcgtaatttttgctttcaaactttcaaataaatccaaaatagtaacctccataaaagcgttttatttataatctgatacaatcatacaacgtttcttatcgtccgacaagtcaataatgagagcgttttacttttgttcagaaacgtcttgtggtaattgccaattaatgggcgtcattgcccactgttttaactgctgatttgtttgtgaaaatggtttggagccaaagaagccatggtaggctgctagcggacttggatgaacagccgttaacaccgcattttgactttcatcgattaagacccgtttagctttagccgcattgccccataaaataaagaccacgtgcccgcgttttgacaaggccgcaatcgccgcatcagttagttgctcccaaccttgctggcgatgagaattggcctcaccggctcgcacagtcaacacagtatttaataggaacacgccttgatctgcccaggccttcaaatagccatgattaacaggattaaaaccgacatccgtttgtagttccttatagatattctttaatgatggcggcactttaacccctggcaatactgagaaactacagccatgcgcttgatgtggaccgtgataaggatcttgacccagtatcacaactttgacttgttcgaatggcgtccactcgaaagcttggaaaatatggtgcatttccggatagaccgtagtcgtcgcatattcttgcttcaaaaattgatgcaactgaccataataaggtttggcaaactctggttctaagacggtttgccaatcattatgaataattgttttcattttttcacctcatcgattagtttatcctgttttaacacaagttgctagaagaaagtgccctcccatgctaagatataactaagtctttaaaaatacgttttcaggaggaattgaattgatttcacttatcgcatctgacatggacggtacccttttaaatgataaaatgcaggtttctgacggtaacatcaatgccatcaaagcggctcaagacgctggtattgaattcatcgtcgctaccgggcgcagtcgcaacgaagcacttccgctaatggctgaaggtggtatcaaaccagccctaattaccatgaatggcgcccaagtcttcgatcaattgggcaacgaagtcatcaacattccaattgaacccgctactgtcgtggcagttacggatgaattacgcgctagtggttactattttgaattgatgaccactgccgggaactattctgacagccaggtcaatcgcattcaaaatgtggccgatctattagtcgacctcaatcctgataccagttataaaattgccgttgccctagctgcagcgcgcctagaattaatgaatatcaactatgtcgatgatcattatgccggcattattgctgatccaaccattaaaattgttaaaattattgctttcagtacgaaaggccttgcggatttagaacccgtgaaggttttctgtgaagaacgcggcgatttaattgtcacctcctcttcaagcaataacatcgaaatcaaccacatcaacgcgcaaaaagggattgcacttgcagcctatgccaaagaaaaaggaattccaatgtctgaaacaatggcgattggtgataacctcaatgattattccatgattgaagcagcgggcatcggcgtggcaatggctaatgcagtgcccacgattaccgacttagccaattaccataccgctaaaaacacacaagacggcgttgctcaagccatttatcacgccattgatcttaaccaagcagccgaaaagaagtgataggttatgcctgatttatacattaagcatcaagcaagtgccttaaaaggggtctcaacgattatggatgaccaccaacggcccttattcctcttagtcggcagtcgcggcttacgccaagatggcttttcactctaccggctttcgggtgaattactcggtgaaatcaaacagaaatcactcgggttttcacccagttttgaactatttcaaaacggccaatcaatcggcagcctccagaagatttggggtgtttggcatgaattcgtctatgttaaaaatctcaactggctaatcatgggcgacctaattcagaatcaataccgcattatctaccatacccaaaccatcatgcaaactaatatcatcctgacaagtgctgggcctacttttaaattagcgattgcggaagatgcagatcaggtctcttgtatcttgattgcagccgttttaaaccattgggtgtatacacaaccgaaggctttcattcgtaaattagcacctaacacgcttcgctttagttaaacaaatgagtcaccgtcaaaagcggtgacttttttgttgcccaacgttaaattcataaaaatttgcgtcccctttttttaattggtatagttgaatatgttatttttaaaattaaaggggtctttacaatgccaactggcgtcattattaattcattatccgtcttattcggcggtattatcggtggtttattgggtgataaactatccgctagattcaaaacagagatcactttaatcttcggcgtttgttcaatgggaatgggcatcaacgcaattgtcgtcatgcgaaatatgccggccgttatcctcgcaattgtcttagggactggcattggactagccgttcatttcggtcactggattgatcgtggcgccatcttaatggaaaagcccatttcaaaactatttccagttcgtaaaacaactttgacagatgctgaatttatttcagccctcgtaaccgtcatcgttttattttgtgcaggcggcaccggtatctatggtacgctcgatgccggtatgactggtaatagcaccatccttatttccaaatcagtgctcgatttcttcaccgcagcgatttttgcttgcaacttagggtatgtcgtttcagccattgccattccgcaatttatcatcttctatattattttcttactcgctaaattaattttcccattaaccacacctaccatgattgccgatttcaaagcctgtggtggctttttaatgctcgcaactggtttccgaatggttaaaattaaagagtttcccattgcggatatgatcccggcaatgatcctcgtcatgccacttagctggctatggaccacggtgatcatgccgctgttatcgtaaaattaagattcagtcaccaaactaaaaaacgttattagcattcgtgctaataacgttttttaggttagtaatcaatacgataccggatactcataccgacttttaatcaattcgtgtgcttcatttgactcatataaattgcgagactgctgattctcaagttcaatttcataaagactacccactggaaaattccgaattatttctatgggtaaatattgcttcatcattggttcagatagtccctcatcgtcggattcaatcaaattagcgagcatccccgttgacatttcttttaccggaatatattttttaatataaaaataggttctactattcgtctgtcgacttagccactggattctttctttgaatggtctagtctttagccacgtataatgctctaaaaaacgacgccaaaaagcgagttcagttgagtaaaagcgaatctccccgccattggtcaaatcatttatttctgttctatcggcacttccttctaataaaccactcagcatttcagaaactggttgattgaattctgaatattcgttggactgctccaaaagcattgtttcctgttttgataagccaacaatattaggagttgtcgaagtgcccctaaatgaatattcactatctcctgacattgatttcatatatagtcttgttaaagcctttttacgttgctctttcgtcaatttaacggttatatcaaacccgccgtcttcatcagcaaacatccaatcgtgtgttatcttgggtgctatccccagcactgttcgatagtaacgattacctgccgtaatatatgatccgtattctgcttttggcacatgacacatcgttaaaataagtacaccaaataacaacatgatagttaggcaaccaattgaacagccccttgcccagcgcatcgttttttacttcatttctaaatgatcctccaattctaccgttctatagttaacgtgttaaaccactttcgtattagtatatcatcgctattattaaagtaaaaggctcggacaaacgtaaatttgtccgagcctttttctaaaattttaaattaaatagctttgaccatatgttcatagcggtgatcaccaatcattagctcaccttttttaacaaaacccatgcgctcgtataatttcttagcaccgggattttgtaaatcgacgctgaggctgatcatcttctcgccgcgttgtttcaagtaatcaggtaaagccttcaaaagtgcggtcccaacaccacgtccttgtgcgtgttcagccacagctagtgtgtctaaataccattcacctggttgggcttctttatccgtgaaaaagcgagtttcttcaggtaaaccgatttgtgggaaaagtggtgctaatacatcatcgatgtgggcttccttttcttctgggaaaccaacgataatccctaatatttcaccgtcttcttcataaacaagcgtattagcataactataccggtattctggcatctcaaatgcttgttttaagatcttaaatagattttcgagcggtatctcctgaaaaagtggcatctccatttcttcaaaaacaatattaataatgggtaagacactttgtgcatcttcaattgttgcttgacgaatcattcaaaaacctccttcaatatcctttaagcatacgggggaattcacaaatcgtcaactttcaactaatctaaatctgcacgataatccgccattttcttagcgaataactctccgttagtcggcggcgtataggtcaacgcattggcgccagcctcaatcgtacttagaatggcctcttcatcatgcccacctgtcgcgatgattggaatctgagggtatttttggcgaatcgctttaataatcgctggtgtcttcgccgcaccacttacattgagaattgaaaccccggcttcaatctgggccgcatagttctgacgttcggagacaaccgtaccgacgattggcacatccactaccttattaatcattttaatggtctcaacagaagttggcgcattgaccaccacacccattgaaccagccgcttccgccaataagcccatgtatgcggagcgactaccagatgttaatccgccgccaatcccgtttaaaactggaatggtcgccacgttactgatggcattcattaccgcgggatgcggtgtaaacggataaacagctaatacagcatccgcattcgtattattaacaatcgccacatcagtcgtgaaaatcaacgttttaattttctgacctaaaatcttaataccaccaacttggcgcgcaattgcgggtggtccaacaacactcgttttaagtggtgtataaatttctggtataaatttttctgtcattaatcagccctcctcatttaaaagtcgttgtaaacgctgcgccaatgccattagttgagaaacattgagacgcgcaaaattaattcgaaaagcagcctggtgtgcaccgaataatgtgcctggtgctagtgccacatgcgccgcaacaaatggtgctagtgcatacggtttaactgctcgtgtcccccaaatataaaaaccgccttgcgctacactgaactgccagtcaggcaacgcttgcgccaaaagctgttgcgtctgccgtgcccttgtctgtagttgttgacgcaatgtgaccaattgcgtttgaaaatgcggctcctgaattgccaaggccgccatcacttgcgacataatactcggaaccaaatccatttcccgctgaacacgcaccaattggtcaatcacttgcggcgttgcggcgacccacccaattcgggtgctggcacccatgatcttggacaaagaactcatataaatcacattttcaggatcaagttgcttgagcgttggcaaggctggtgtcgtttcaaagcgtaaccaaccaaaaacatcatcttcaacaatcggcacttgataagtctggcaaagccgaataaccgcctgtcgtcgttctaagctcatgacttgacccgtcggattttgataatttggattgagaatgactaatttaatgcgatgctttacaatcagctgctccagcgcagccaattgaatgccttctgcatcgagcggtgcaccaaacgagcgaatccccgttgcctcaaataaggttgcttcatggaaaaacgatggcgattcaaccgccactgcatcccccggtaccaataaaccctgtaatactagaaagagcgattgttgcgcacccgccgtcagtaaaagttgcccttcagggagcaccaatttttgattctcctgattcaagcggttaatcgccgttaacaatggggcataaccaagtcgtgtttctgcttcttgagcttggttaaaatcttgccacgttaacggtggaaattggaattgcggcatcaaatcagctggtaagtcgctcgaataaacatcgattaaatcggcgggttgctgtgcaattaattgttgcagtgctagacgcttagcctgcccaacttgaaaaggttgcgacgttaaatacgtatgccaattaacgcgccgctgcgcttgttgttcaccagcctgttgactgacgaaagtcccactaccaacacgccgcaccaatataccatctgtcgtcagctcatcaaacgctcgcgtcacagtcgagcgattcactgttaattgtgttgctaaccaccgttctgccggtaattgttcgcctggcgataataacccctgctctaacagattaatcaccatttttttaatcgctaaatattttggtttctgtgttggtaaataacgtgcccactctatcaagtcctcacctctctttaagtgtataaattggctggtaaaaaaacaagccaattggctcttttgtcaccgcacactatccgttaaggttaatataaccaaaaggaggcggcttatgtcaaacattctaactattgctggttctgatacattgggtggcggtggcttacaggcggatttgaaaaccttcgaagcctttggtcacttcggtgtcagtgctgtgacctgcctcgcaacggtcatgccggatcaaacttttcaaattcagaatatcgaaaccgaaacggtattagcccagattgaagccattttgcattacgtgccactaacgactatcaaaattggcttaatcaacgatgccacgacacttgaaaaaattggtcatcttttacaaaaacaaccacatttgcaaatcatcacggatccggtcttggccttcaaagaaaccactgataagctgcaacaacactatctagatagtctgaaggaattcttattgccgcaatccctagtcgtaacccctaatctagttgaagcccaaatactaagtggcttgccccagattcagacacgggcagaactggaacaagccgcaaccattatccaatctctcggaccacaacacgtcgttatcaagggtggacaacgattccctgatgatgacgccatcgatttgttgcatagtggcacaactaaccactacctcagcgcaccacgcttaactagcgcaacccgcaacggtgctggttgtaccctatcagccgccattacggctgaaattgcaagcggtcatgccgtttatcccgcagttaaagcggctaaacaattcgtctatcacgggattcaaaatgggattcaactgcgccacggcttcggtaatgtgcgccaaggaggctcatatgaattttaagcagcgtcaaatacccgttattgcgattctaacggccctcaccgtttctttatctatgttattcatcattcccgtcccagcgactaaaggttttgtcacgctctgtgaagtgggtatttacaccacggcaattattttaaagaatccgggcggtctagcagttggtgcgttgagcggtttactaatcgatttattgtcaggttatccggaatggtgcttgttctcccttttaattcatgggacccaaggctttgtagtcgcgtacctcacccgcaataatgagcagcccagacgcttactcatgccactgctatgcgggagcgtcatcatggtcgttggttattgtttagccacaagctggcttttcggttggaccgcaggaatcgcctctatttttagtaatatcgtccaaaatggctttggtattttagtcacagttcccttggtcaaacaactttaccgggttcgtccccaactttttagtgaataggagttttttatatgtcaattaatctcaatcaaattaaacaggatttaactcaaattaccaacgacgtcttaacagccgccaatttacgccgtggcgatatcttcgtgctcggttgttcaacgagtgaagtggttggcggccatattggcaaagcctctagccgcgaagtcggtgcaacgattatcgaaacccttttagaaattctcaagccactcgatatccaattagctgttcaaggttgcgaacacatcaatcgtagtttagtaatggaacgttccgtcgctgaggcacacgattttgaaattgtctcagtcgttcctgcaatgcacgctggtggggcttgttccgtcgctgcttttgaacaatatagcgaccccgttgaggtggaacataccgtcgcccatgccggccttgatattggggatacggccattggcatgcacgtgaagtttgtgcaagttcccgttcgccctagtctcgatacattaggtgctgcacacgtgacagcactccgatcacgaccaaaatacgtcggtggaccacgcgctacttatgacatttaagcaaatctaaaaaaggcattcagaaattaatctgaatgcctttttatattcgtcactctaagttaatgctcaaaatctgattgagctttaaaaccactcttatttgaaacgtgcttttgaagctagatttctgcgcttaacgacgattgtcaaatcagcgatttcatcgctaattcactactctatgttaatgctcaaaatctgatcaagctttaaaaccactcttacttttgaaacgtgctttgaataccaactttctgtgctttgctacacttgtcaaaccggcgaatccttcgccaattcgccaagttaggcaaatgctcaaaagttacccggtatcaaaaccactcttatttttgaaacgtgcttttaaaactagcttcttccgtttagccacgttagacaaataatcggttccatcgcttatttgtctccctgagctaatcctcagaagctaaccagttttaaaaccactcttattctactgtaacactttttgctaggtttcttggttggtcaacgtcgtagcccctttgaagacttgcataataagcaatcagttgtcctgggatgatacctaataatggtgctaataatggattaacatttggtaagacgacttggtcgccagcttgtgcgtgatcttcgctgacaatcgttaacgtcttagcaccacgtgcgcgaacttcttgcaagttgccccgcgtatgatcgatcgtcttagcatccgttaagaaggccattactggtgtgccatcttcaatcaaggcaatcgtcccatgtttcaattcaccggcagcaaagccttctgcttgaatatatgatatttccttcaacttcaaggcagcttctaaactcaaggcataatcttcgccacggccgatgtaaaaggcattgcgcgttgtcttcaagtacatcgttgtaaaatcttcaatcgcttgtttttcactcaataaagtttccatccccgttgcgactaaagccaactcatggttaacgtcgaaatcttgggcggccttgatagcggtatggcgaccaagtgctactgccaagaataattcaactgcgatttgagcagtgtaagccttcgttgaagcgaccgcaatttcaggacccgcatgaagcaacaatgtataattggcttctcgtgaaagggttgacccttggctattagtgattgttaaacttggataacctaatctattcgtttggaccaatacttggcgactatcagctgtttccccactttgtgttaggaagataaagaatggtttcttcgatagaattggcatgtgataaccaaattcactggccacatggacttccactggtttttccgctaatttttcaaataatgattggccaattaaaccggcgtggtaacttgtcccggctgccacaatataaatccggtctgcgtcatcaattgccttaagaattgctggatcgattttcatttgaccagcgtcatccacatattcggttaacaaacggcgcattactgcgggttgttcgtcaacttcttttaacatgtaatgggggtaagtccccttgccggctgcactggcatccatgtcaacatggtagctatcacggtgaatgaaagtcccgtctaaatcttcaatttcaaccttgtcctttttaagagtgaccatttcgcggtcgtgaatttcaataaagtctttggtttcgtttaacattgctaaagcatctgaacaaacaacgttgaaatcagtgccgacaccaattaataatggtgacttattcttagccacgtataacgtctccggatcgttccgatcaatcatgacaaaggcgtatgagccttcaatcaacgttagggccttgcggaaagcttccttagctgatagttgttctgtcttagctaaataagcgattaattgaactgcgacttcagtatctgtttcacttgcaaagttgacttggcttaaataagttgcacgtaattcagcgtagtttgttaaaacgccgttgtggaccaagtaaaaacggccatcttctgaaacgtgtgggtgagcattggcttgacttgcaacaccatgcgttgcccaacgtgtatgaccaacaccaattgtaccctgtacttcaggaccaactgcggcttttaaaacactaattttacctggttctttaaccaaataatcgcgaccactttgactattaacataaatcccagctgaatcataaccccgataagctaatttttctaaaccatttaataaaatttcagtcgtatcttctttaccaatcacaccgacaattccacacatatcaaattcctctttttctctttggttttatttttaaatttaattggtataacacttaaatataataacaccaacgtttttattgtcaacatttttattggtatatatcaatataaaacattggtatagtcctgaatgaatcctgttaaattatgctatactagacctattcgaaacttaatcgggagtcttgatcatgaaaaaagctattctaacgcttcgcctcatttcgctaatcgggttactagtcggggtgggtttcatcttggttgcccctcagaccgtcgccttacatatcaccgctgataacgtcgttgattcatctggtagtcgcttcatgttgctcctcgaaccactcttattgataatcgtcaatgaagtcagtatcttcagcatcaaacgctatcgccgcaacttctcgttaaccgaggcgccgatgattcttgttaaagagtggtattacatctccgctgcgattgtcttgttgattactttcatttttgtgatgtatcaacaaatcacttggcattaaaatcataggcacaaaaaaagagcgtaagacaaaattacttttgtcttacgctctttttgaatcgtcgaaattttatcgtttaaacgtgcttttcgaaactgccttctgcgcttaacgacatctgccaaatcagcgattttatcgctaattcgtcaaattaggttaatgctcaaagtcaaaccgtttcaaacgcactcttggtttaaacgtgctttttggttgcaacaactaaaagcactcctttttaattattcaccaatttcagattgaacgactgcggcaatttggtccgcatattggttaaccttttcttcagtagcggcttcacacatgacacgtaatagtggttctgtcccactaggacggaccaagacgcggccatcaccgttcatttctttttcaacagtatcaatagcggcttggatcttatcgtttgttaaccaagcatccttgtccttaactgttaagttaactaatttttgtgggtaagtttgaactggagctgccaattctgataatttcttaccggtttgtttcatgacattcattaattgaatcccagttaacatcccgtcaccagtgttatggtaatcaaaaataataatatggccagattgttcgccacctaagttaaagcctttttcgcgcatttcttcaacgacgtggcgatcaccaacgtctgtttgggcagatttcattccattagcttcaattgctttatacaagccaatgttactcatcactgttgtgacaattgtatcttgtttcaggcgacctttttcagaaagatagtgacccaaaataaacatgatcttatcgccatcaataatgttccctaattcatcgactgcgatacaacgatcgccatcgccatcaaaagctaagcccatatcagcgcctgattccaaaacctttttaacaaggttttcaggatgagttgaacccacaccatcattgatatttaaaccgttaggatgagtagcagttgttgtgaagtcagtttctaaatcagcaaagactcggctaatcaaaccacttgttgaaccgttagcgccatcaacagccacttttaagccttctaaatcatcaggaattgtatgttccaagaattgtgtatatttcaaagcaccttctggatattcttcaacagtcccaaggccttcaccttctggacgtggtaatgtatcttctggtgcatctaaaatagcttcaatttcttcttcagtggcatcaggtaatttataaccatcagctccgaagaatttaatcccattataaatagcggggttatgtgatgcagaaatcatgataccggcacttgcttcttgaaccttaattaaataagcaaccgctggcgttgtgatgacgcctaatgataggacttcaatcccgactgacaataagccagaaattaaagattgttctaacatttgtcctgaaatccgtgtatcgcgagcaactaacactttaggccgttggtttttatcagcatgttttgttaaaacgtagccgccagcgcgacctaatttaaatgccatttctgggcttaattctagattagcaacgccacgtacaccgtcagttccaaaatattttgtcatgtctaattatctccattccatcttcttaaacgttttatgattcgttcgtatttgctgtactgcttgagttgtcactactactacttgactcactggtttgattattatcagtcgtctgactctcacttgtcgtactactactgctactttgcacttggctttgactcattgaagtcgttgactctgatgaagactgcgttgttgtttccgtacgactagtcgtcatcccagttggtgctgtaaccttaatattgacctttacctgtttaggatgactgtcatagaccccacttggaagcgtcaaagtcaccgtgcgtgtcgtatctttagtgatatccgtcatatcgaccgttagtggtaagtccgttaaggttgccaaagtttgcttcttcccgtacaccgttacctgttccgtttctgaactcaacgtgtactggtagccgctcttttcacccgttttttgtaaactgagtgggaccgtctttttattcatctgaacggcaatcttaatattaacagtttggggtgaaattaaaacattcaccgtcttaccattacgatcaaccgcttgtagaagcgtttcttcgttaatatcatttttggtccctttatcaggatcaattgtcgctaccactcgcgcaactgaattaacagctgccttggctccactaacttgtacgacatcttgactaatcttaggattgccaatactataaccagtcgccaaattttcttccttgacgttaacttgtactgggaactccttagtcaatttatgttcaattttaaccttaatggtagctggttcaatcttcactttgatgtctttgttaatcccggtttgtgttaatttaaccgtatgcgtcccagcacctagcttcgttaaatcgccaatcacccggaaattcaacgtattgacagcagatgtgatcaacgcattaggacctgacaaggttactttaactttttgaggatagccggtaataaaatatttatcggtatccgcattaatttgcaacggcaccttcacagtttcactgcgggtcgctaacatttgtgtgttgttattattaatttggcgcgtggtattaattttatcaatattaacgtagctaaaaaggagtaacgataagaaaagcgctaatatccggtacaaccaaggcccttctataaagtttttcattatttatggcctccttttttgaagccgtcaacgaattcttgcaataggctcaccttatcttcttcttgcgtaattaagtgtgagtttaagtatttcaagtaatcttcccgcgttaagtcgcgcatcaattcgttattcttggttaacgtgacaccaccggtttcttcagaaacaacgatcgtcaacgcgtccgttacttcactaatcccgacagccgcacgatgccgcgtccccagttccttaggaattagattactttctgacagtggcaagtaagccgccgcaacggcaatcttatcctcgcgaataataacggccccatcatgcagtggcgtgttgggaataaagatattaatcaataattcccctgtgacatcggcgtctagatcaatcccggtttcaatatagtcttctaacccggtattcatctgaatggtaatcaatgccccaattcgccgctttgacatgtactgaatcgccttatctaaggccttaatcaagttgttttctttttcaagtttaggattattaccccgcatcaatagtgaaccgcgcccgatatgttccaagccacgacgaatttctggttggaagatgacgattaaagcaatcacaatccaactgataaattgatccatgatgtacgaaacggtccttaggccaaggtaccaactgacaatcttgatgatggcgatgaccatgatgcctttgaaaagctgcacggctttcgtgccccgaatcaacatgattaatttataaataaaataccagaccacaatgatatccaaaatattggctaacatgcgccaggttaacaattgtgcccaatcaactgacatggtgacctccattcaaaaaatttctttttccattataccatgaagcctttttgtttgctgatagcttcacaattaatgttgcatcttaaattctaggaataaatcgttgtatagaccaaccatctcaggtgataaatcactataaacttgtagtttattcagcactttttgacttgggtaataggctggattattccggattgctgccggcaataacgctttagccggcatattcggtgttgaatagccaatgtattccgcgttttgcgccgcattcttaggttctaacatgaagtttaaaaaggcataagctgctttggtatgtttagccgtcttgggaatcacgagattatcaaaccaaacgttgctcccttcttccggaatcacatagtgcagatgtttattgttggctaacatttcagccgcttcaccggaccaggtcacggcgacgctcgcttcattttgaaccatgtacatcttaatttcatcggcaacaatcgccttaacattgggtgccatctgatcaagacgtgctttagcagcttttaacgccactgggttggtactattgacagattggccgttttcaattaagcccaccgccatcatgtcccgcgcactatcgacgaccataattttaccgcgatattttgcttgccataaatcggaccaatgcgttaagggccgatcgactaattgatcattatagataatgcctaacgtcccccagaaataagggagcgagtatttattacccgggtcaaatggttggttcaaataaggtttaccgatgttttgaaaaccagttagtcgtgaatgatcgattggtttcaagagattggccttccgcattttttcaatcatatattcactgggaactgccaaatcgtaagccgtgccaccttgtttaatcttagtgtacatcgcttcattactatcaaaagtttcaaccgaaacgtgatagccggtttgcttttcaaatttcttaatcaatgatgggtcgatataatcaccccaattatagagggttagtgtattatttttcgtataaccttgcgatttttgtagctgaaccgtcccgaaccaaagggctgcacagacgacgaggattgctaacgttaatcgtcctaatttattcatttaactggcgcccccattttctgcttccgttttgctttgtgtgcttgattgcgttgatttaataagtaatagccacccactaataatagtgagaagacaaacatcaaggctgatagcgcgttaatttctaaactaatcccttgtcgagcccgtgaatagatttcaacggataacgtttcaaaaccgttgccggtaacgaaaaaggtcactgcaaaatcatcaagtgagtaggtaaaagccatgaaaaagccggcaaaaatacctgaactaatatagggcaaaatcaccttgctgagcacttgccaatcagtcgcacctaaatcacgcgccgcatcaactaatgcaggtcgcatttcgtttaatttaggcagcaccatcaagaccacgattggaattgagaaggcaatatgactcagtaaaactgacccaaaccctagcccaaggcccaagaacgtgaagaaaatcaagaagctggccccaatgataacatcgggtgagaccatcaagatattattcaaagataaaataatatttcttaaccgccgttgcttggtggaataaattcctagcgcgccaaaggtcccaatgatcgtggcacatagtgatgataaaatcgcaattaatagtgtttctaagacaatctcaatcatccgtgtatctgcaaataaatcttggtaattttgccaagtgaacgatttaaagccgttcatattgtcgccgctactgaaagaatagaaaatcagataaaaaatcggtgcgtacaacaaaatgaagacgacaattaaccaaacatgttgccatttaatcttagcttgtttcatttcatcgtcaccttcttcttcgtcttcttttcaccggttaacatcatgataaggcccattgcgacaatcaagacaaccccgattgtcgaacccatgccccaattcatcgtcgttaggaaatgttcttcaatcgcggtccctaaagtaatcacccggttacccccgattaaacgcgttaacatgaatagtgataatgatgggatgaagatggcttgcacacccgctttaacaccggccatcgtcaaaggtaacacgacttttgaaaaggtctgccaattactggcccctaaatcgcgactcgcattcactaaagaaggatttaattcttccaaactattgaaaatcggtaaaatcataaatggaatttcaatataggtcgccaccaccaagaaactaaagttggtgaataaaatctgttgtggcccgataccaaaccaccctaagaagtgattgatggcgccatcttgactgaaaatcccgataaaggcgtatgcttttaacaagagattaatccaagttggtaaaataatgagtaacagccataattgcttatgcttggtttgatggagccaataagcggttggataactgattaataacgtaattaacgtaatcaaaaaagcataccacagtgaattaagcgtcatcttcaaataagtgccggattcaaaataagtgacataattttggagcgtcacatggttattaatatcaaagaaggattgataaacgattaaagcgaccggtgctagcacgaataacaaaagccacagcgcgtaaggtaaataataaattaattgtttttttcgcataagccgccttaatcctcctcttcataactttcaagacgcgcgtcaaaatcttcttcagattcgccaaaacgcatgacgtggacgtcctctggttcgaagaataagccaacttgttggccatctttagctgggttagtcgaatgaattaaccaccggttacgatcgtcatcataggcggtaatttcataataatctcctcggaataattgcgtatcaacggtcacgactaactgtccttggttgacggctacgatatccaaatcttctggacgtaacacaatttcaacggcttcattaggtttcatccctgcatcagcgcattcaaaaactttaccgacaatttctacttgataatcagcaaccattttcccgggcaatatattactttccccaatgaaatctgcgacaaagtgattaattggttcatcgtaaatatcaacgggggtcccgctttgaaggacattcccctcgttcataacaaagatttcatcactcattgcaagtgcttcttcttgatcatgcgtcacaaacaagaaggtaatccctaatcgttgttggagatcacgtaattcatattgcattgcttttcttaatttcatatctaacgctgataacggttcgtctaataagagaactttaggttcattggccaacgcacgggcaattgccacccgttgttgctgcccacctgataattcactaatttcgcggtgttcatagccacccaaacgcacaagtttcagtgcttcaatcacctttttttcaacgtcacttttcttaactttacgtaaattcaacccaaaggcaacattatcaaaaacgttcagatggggaaataaggcgtaatcttgaaaaacggtattaacctgacgcttattagccggcaaatcattcatccgttttccttcaaataacacatccccagaagaggcatttgtaaaaccagcaataattctcagaattgttgtcttaccacagcctgagggccccaataaggtataaaacttacctttttctagtgccatatcaattccctttaggatttgattatcgtcatacttcttgatgacgtttttaaattccaccattggttgctgcattttcgtaatcccctctacatactattataaataatggctcgataagttaataaatatcccttcaattataccgtttccagcttagtatgccaattcaaaccttgttttgttgtataatgaagctaactaaactatcggaaatgaggttttatattatggtcgcttatcaagctttggttttaacgcacgacaatgaaactgttactgctcagtacgcaacaaaattgacacccgatttaccaaaagaaggcgtcttaatcaaggttgcctactcagatatcaattacaaagaccgcctcactatgaatgctaaaagtggcgttcttaaaaactatcccgcaacacccggcgttgattttgtcggcaccgtggtcacttcagacaatcctttttttgaagcaggtgaatgcgtcttatgtacaggctacggtaccggcattagcatcgacggcggttatgcacaatacgtcaaagtccctagcgaatggctcttgaaatgtccaattgaactaacaccccaagaaacaatgcaactgggaactgctgggttcaccgcggctatcgcccttactaaaattcttagacagccttttacacgggatcacgatacaccactactaatcacaggtgcgactggtggtgttggtagctatgcgctcacaatgttagcacaacttggtttcaccaacatcacagcgacgacacgcgatctcagtcaaacggattacttaactcaactgggtgccaaacatgtcattgcaaccgatgatctcttaaccgccccactcaaacccttggcccaccaatcctatactggtgtcatcgacacacttggtggtgatgtcttagcacacattctcccttacatggcccaagatggtttagtcgcagcttgtggtaacgctgcaggctttaagctcgcaacaacggtctttcccttcattttacgcggtgtaacgctcgtcgggatcgattcggtcaattacccccgtaaggatcgcaaagaaatctggcagttgttagccactaacttcaaaccgcaaacctggccattaattcgcaacatcgcattttcagaactcgcaactgaactgagcacccccactaaacaagctggtcgcgtggtcgttaaaatcgatactgaacattaaaaaagtgattctactcgtccataacggatgcgtagaatcactttttagttagacttatttatccattttttctttgacatcgtcgatggcttcatttgtcttttcagcgactttatccttagcttccgctaatttttctttggccttgcccatcatacccttggcattaccttttgcttctgtttctttgtcgcctgttactttaccggctgtttcttgaaccttaccagtaacttgatctttcatgccatctaacttctctttatttgtcatttaaaacactccttactgattagtatatcttcatggtaacgaattactcaaccattcgtcaaagtttatgattatcatttatcagtcaattgaccatcacgcatgatgtaaacttgatccgtataagctaaaacgcgttcatcgtgcgaaaccatcacaatcgtctgacccgtttttttagtaattgccgataactgctcggcaacctgaatggcacgtttgctatccaaactggcagtcggttcatcagcaaagattaacgctggctgcccataaagcgcgcgggcaattgcaacacgttggcgctgcccacctgacaagctagccgggtattgacggcgttgatccaatacccctagttccttcaaaaggtcgtctgccttattcggactagctgttttccggagtcgatcaactagttcaaattgttcactgaccgttaaaaaggaaacgaggtttgaactttgcaagataaaaccaaaatcgttaaatcgcaaggccgaccgttccttttccgttaggtgtcctatttcttgatccttaaaatagagctgaccatcactaggactttgcaagctgcccataatcgttagcaaggtggttttccctgaaccagaaggccctgtcaaaccaataaattgccctttttcaatcattaaatcgatttgcttgagggcggtcgtctgctgatcaccactgccaaatcgtttagtaatttgttctaagcgcattaaactcatattaagcccctccaatcgcatctagcggatcaatttttagaatccgccaaattgaaaatagtgcaccgaccaccgtcatcagcaatagcaccgctgaaaaggccccaattaataaactattattagcatacggcacactgactggtaataccaaggttgttagcaagttgccaatgaaaccagcacccacgccaattaagcctaggaagagtgattgccacatcaaactggatactaattgaccacctgatatcccttgagttcgcatgacaccataaaccgtcgtcttttcaatggtgataatatacataaaaatccccacaatgaaggcgacaatgattagtaaagcaccaatcattagcgcgaaggttttcacttgtggcccgtaacccggaatattatcgattaactgtttaatcgttaggttcgttaattgatcatcctttttaatagaggcaccatctcttaaaacgacggcattaatctgatcgttagccgctgggccatagcgcatctgacgaaaatcctttaagctcaaatacgtgaccggttgcgtgttataacggtgatcgttcgttaacccaactaccttatatttttcagaacggccgtttaatttaatctcctgattcaatttaatcccttggagactatcatcaacagccacttcacgggccgcttttggtaagcggcccttcgttaacgtcggttttagaaaatcatcaaaatcaatgccaaaaacactcgtattttgtttttcgatttgcgaaccactaacaacccccatcatctgacctagataagcgtgatcttgttggtcccctttaatcgttggcagtgactttgtttgtaactcagaggccgccaaatttttattcgcatactgactgatcacgattcgattggcatcccaatgatcaattgctgaccggttgttgttggccaacccatacgctaagcctgttaaaaaataaattaaataggcaatcaaaaaaagtgtaaaaataattaatgaatagcgcaatttagcatgcttcatttccttaattgctagatacaatgtcctcatcctctcataaagcctacttccaacttaacatatccagcgtcatcataatatttatctgctctaagtattaaaaaaggcccgggacaaaagtaatttttgtctcgggccttttttaacatcaattgtcaatgttttgggaaagtatatttcggttcgtctaattgcgcatcataatcaattgctaggtcatagtcagcaaaaaaccaagcatccgaatcactggcgaaataagtaatcccgtctttttcaacttggccaatcggttgactgacttcagcccgttccatccctaatgaaaagccgtcatgaacagccgtttgaccgtaaaccttaccgaaaaagcgcactgcttctcctggttttaaagcgagttcctcttgaaaccaatgacttgctgcatctgtaactgtaatttgcatcttcataacctcccaaatttttaaattaatccgctaattggtgcttgatggcataaattgcggcctgcgtccgatcgtcaacttgtaacttcgctaaaatattggaaacatgcgtcttaaccgttttaagcgtgatgaataattcatccgcaatttcttgattactgcggcccttggcaatcaagcctagaacttctcgttcacggttcgttaaatcttcgtataactttgtttctgcctggtgcgtcatacgattcatcatcttattagtgacttcaggttctaaaactgattgccccgcagttgtcttccgaatcgtgttggcaatctcttcagccgtcgacgtttttaatatgtaacttgctgcaccagcttcgattgctgggtagactttttcatcatcaataaagctggttagaataataatcttggcttgaggccaagcctttagaatcgtcttagtggcttcaatcccatccatttctggcataacgagatccattaaaatcgcatctggccgtagtgccaatgccttttcgacaccttcgcgaccattaaccgcttgatcgaccacttctaaatcgtcttgcacccctaaataagttgaaatccccaatcgaaccatctcgtggtcatctacaatcaatacttttatcactttaatttcgctccttcaaaagtggtactctaatttcaacgcttgtgccttggttgggtaaactaataatcttagccgttccgccaaccgattgtgctcgctctgtaatgttatttaaaccgtaactgccagccttttgcgcaacctttggatcaaagccctggccatcgtccattactttcaataaaacggtctggccgatttttttcaaatagacttcaatttcttgggctttcgcatgccgcaaagtattggataataattcttggacgattctaaacagattatcctcaatcccacttggtagaataacattatcaatatcccaagtaatttccaccgcaattttagtcttcaattcattcaacaactgaataatcccatcgcgtaaactcttaccctccaacgtcactggccgtaaatgtaacaacaatgcccgcatctctgactgcgcatcattcaagacccgctcaaccgtcgttagcgattgtaacagctgcggattatccgcttgtttttgggccacttcgcttaatgccgacaacatcatcgtcgccgcaaataactgctgactaacagaatcatgcaactcgcgagctagacggtgccgctcttgggccaaaatttcttccttcgtctcccccgcaatgactggtggccgatcactataactttgaatgtcacgttgtaagcgtatcattttttgtcgtaattgttcaactgtttgttcgattgtcatcgaaaaattaccattatcggcattaatttgtttaaaaacgggtgattcatactgtccggaaactaaatattgtaattggctctccgtatgtgagacctgttgacgcaaaacgagataaaaaatactcgttacaaccgtcgccacaattaacgctgccacaataatataggcaattaacggtacatagaaaaagcgaaccgttgccagacttaataaccactgatcttgttgaatgctatagaaatacgcaaaaaataacgccactgaaaacagaagcgtcaacaatccggtactaataaacacaaaactgcgcgcgagtttactcatactagaatcacctcaagatcgccaatcacgacattcgtgataattttcagatggcgactttcttcatcataattggtactatacaactgaagtgactcatttttcaagtgatattgttgctcgtcaatcgtgacagtccctaacatcgccgagtggtctaaataaatcccggtgccaactggtactaaaatccgcgttttaccaaaccctttacgaatgacaatatggttatcatccttaggcaaaatcgtactgcctaaatcaataatcgtatcaccagctaagacggcaaagttaatatcgtcccattcaaaaatattcgtcccaatcgtctgatgaccaaaccaattatgccgtgtaacagttgcttgttttggcttgggagcagttgtattaatcggtatgaaattctttttgcgccatggtgcattttcaaataaattgtttaaattacggttattaaaatgactcgcatgactatggttgatcgccatgaaaacaaccgcgacaatcaacatcagccataatgaaaaattaatcaacaatggcactgcgaccgccacactactcatcatcgttagaaacgtcgtccaaaagccccgcttattagccattcggcgtttattagcccagactaatccgagaatcccgataataatatagactaaataaggcggataggtaataatctgccaaataaaggtcccaaagatgattgcttctacgattaaaaaaatccgccagaaaaacggcataatttggtctcctctcaactctttaaaatcattatacaagcttaatcattaaacgccaatcagtctaggggctgattaactcaaaaagagtgcgtttgaaacggtttgactataaaagttcaactaaaaaaagagccgggacaaattaactttgtcccgacccttttagttagcaggttatttttgaaacgtgcttctcaaactgtcttttccggttaactacaaaccgggaaccatggccaagtgtgccataatccccggttttaggttaatcctcaaagccaacccgtttgagtcagcactttatttttgaaacgtgctttcattaagcacaaccttccggttaatgacgcactctatttaacttccgtaatggttacgtgcatgtcgccgcctggtgtttgaaccacgactttgtcaccgacgtgtttgccaactaatgcttgggcaattggtgagtcatttgaaatcttaccgttaaatggatcagattctgcagcaccaacgatttgataagtttcttcttcgccatcttcatcatctgtgaagctgacagttttaccaacagcgatttcatcaacagcaatattgtcaacatcaatcacttcagcaaaacgaagcatgttttcaacttcaacgatccgtgtttcaagtgagctttgttcatctttagcagattcgtattcagagttttctgataaatcaccgaaactacgtgcaatcttaatccgatcgattacttctggtcgtttaaccatttttaagttttcaagttctttagctaggttttctttaccttctgcagtcattgggaattttttttgtgccattatagtcacctcgtttaattattagtcattcatatttagaatagattgaatcttcgttaccaagagatcaatcgccactcggttgttaccaccttcgggcacgattaaatctgcataccgttttgttggttcaataaattcgtggaacataggtttaactgtcttgagatattgcatcacaatatcatcaaatgaacgtccccgactctccatatcacgactcatccgtcttaataaacgaatatcatcatccgtatcaacgtaaactttgatgtccatcaaatcacgtaaccgggcatccgctaataccaaaattccttccaagataatgacatcttgtggttccacatggacaacttcatctgtccggttgtggattttataatcataaacaggttgttcaattgattgatgatttttcaacatggttgcttgttcgatcaataaatcagtatcaaacgcatctggatgatcatagttggtttcttggcgttcttcaaacgaaccatcttgatgtttataatacgcatcctgtggtaataacatcaccgaatggtttgcaaatttttgtgcgattgcctggctaacagtggttttgccactacctgaaccaccagttacgccgataattatgggtgcttttttttgactcgtcattagacgctcctttttctcaacttctttttggacagacagaagtcgaccccgcttgaggtcgacttctatgatacattactaatcttcaatcgagctcgttgtgtctgtatgttgctcgaaagtcttcgagtaataaaccttacccgtcttcaagttagccacaaagtagagataaccttgatcacgatcagctgggtttaagaccgccgttatagattgtaaacttggcgagttaaatggtcctggcccgtaacctgaatgaacatagaggttataaggtgagtcgactttagtatctttattatagagatgtgtcttatgcgtattcaatgcgtacataacagaaatatctgattgaattggcatatcaatatctaaacggttaaagaagacaccagcaatcttttgacgatcacttgcggttaccccttcacgttcaactaatgaggccaatgttaatgtttgttgaacagacaatttcttattcttcattgttgcataatatggttgtaagttttgatccgttgtcttcaccatttcggtaatcaattctttcaacgtgctgtctttatagacttcatacgttgctgggaagagataaccttctaagtgataacgaacgttcttcttagccatcgttgatgacaagagttgtgggtatttcttctcaagacttgccaagaatttcttatcttgaacctgcttcatgaaagcagccttcgagaatttggtttccttgccgactgcagttgcaatctgttcaagggtaaccccttctttgactaagaccttacccttcgaatcgcgaggacgggttggcgtcccttctttttgaaggttagcaataatcttatctaagctcattgattgtttcaaaacgtgataaccagcttggaaatcggtaaagttatgtgtcttcacgtaatagttaaagacagatgcattccgaatgagtcgcttatcttgtaagatagcggcaatttccttgttggttgatccgttaggaatctgaaccgtaatttcttgtttagcatttgtgttataaggtttcaacgatgattggacaaagcgataccccataaaaccaataatgatgactaaggctatcaggatactaataatccaatagacaattttattagctgcttttttttcagcccgtcgttcagcgtattgccgttcttcagccgttttttgatcaactggctccttttgatcagcattcttcaaaggatgacctcctaattgctcttttaaatacaatccttaaaacattataccaaattattcaaaaattgcattaaagattcgtagattaacggactttcgcttggaaagttgccactaagtgcgccacaactttttcaaaggccgcgttaacttcttcttctgttaaagtagcgtcttcattgagatatgtcaatgtataagccattgacttctcgccagcttcgatatggctgcccgcataaacgtcgaataatgatactgaaacaagataacggccgcctttttccttgattgcgttgaccaattcagcattcgtaactgcttcaggcacttgtaaggcaatatcccgtgtcacttctgggaacttaggtgctggtttggcaataattgtttgacgttgtaattctaagattttagccaagtctaattcaaaaatataagtttcttttaaatgtgtggctttcgcaattttaggatggatttgaccaacaattccgatgaatgtttcaccgacataaatagcggcagtccgacccggatgcatctctggataagcatctgttgcttggtaggcaactgctgcttgcaagttatagctagccatcaaggtatcaacaacacccttgattgtatagaaatccactggtgctgccgcttcttgccatgatttgacttggcgattaccgctcattaaaccagcaacatattcgacttcattaggacgcgcttgatcagcgtgttgtaaaaagacccggccttgttcgtacaatgctaagtctgtttgtttccgtgcgacgttgtaggccgcatcatcgagtaacccagtaaccagattcattcgtaaataagcatgatcttgcgtcattggccaatcaagaacagtcgctgtttgtttagcagctaatgcaaattgccctgctttttcttcagtcgtcaaggcataactaattgcttgggttaaaccagcgccttcaagcgtatgacgtgtccggcgaagcgccttttgttcggttgtcaaagcaccagttgtcatatcgccagttggtaatgtacttggtaaattatcgtaaccgtataaacgagcgatttcttcaatcacgtctgcttggatttcaatatcccaacgacgggcaggaattgtcaccgtcaattggtcagcgttgttagccacttcaaaaccaaaacgttcaagtaaatcaatcatcgtttgaacactcatgtcagtgcccaatacacggttgacccgtgctgaatcgatttgaattactttaggttgtggtgccaagtttgttgggctcacgaccccagcagtgacttgaccagcacccaattcagccatcatagcggcggcggcatctaaagccacttgaacatcagcgacattcacacctttttcaaaacgtgatgaggcatctgaacgtaagttatggcgttgtgccgttttccgaacagccgttggggcaaaaatagcagcttcgataatcacatttttagtattagccgtaatttctgaattgaaaccacccatgacccccgctaatgcgattggttggttaccatctgtgatgacaatatcttcattggttaaatcatgttctgcttcatcaagggtcgttaatttttcacctgttttagctaaacgaacttcaatttgcttatgatcgccagttaaagtatcggcatcaaaagcgtgtaatggttgaccatacgttaacatcatgtagtttgtcacatcaacaaggttattgatggggcgaataccagcattccaaagacgggtttgtaaccacaatggacttggttggaccgtcacgttttgtaacatccggaggtgataactaggcgctaattggtcatcagccacttgtgcactgagttgattttttgtttgaacatcactttctgaaacagctacgtcttcaaaatgaggtgtcaatgattcaatcgctgctacttcatgagccaccccgtgaattccaagcgcatcggctcggttagccgttaaatcaagatcgataatgtaatcagtcatcccaagtgcttcataaacgtcagtccccggtgcaattgcttctgggaaaacaaagatcccgtcgacatattctttaggcacaacgctatcggcaaaaccaatttcttgtaggccacagatcatgcccattgaaacaacgccgcgcatcttgccttttttaatcttcacgttatctgcaattcgtgagttaggtaaggccacaatcacatattgcccagcggccacattaggcgcaccacagacaatttggaagggctcttcttcaccaacatcaacttcacaaacatgtaaatgatctgaatcaggatgtggttcgcaacttaaaacgtgtcccacaacaatttttttcaagcccgcactcatttgcgcaacatctgcgacttcaatccctgtccgggtaattttttctgcgagtgcttctggcgctgttgttaaatctaaatagtcttttaaccagttataagatactttcattgcttaaacctcctgtgtgaattgatttaagaatcggacatcgtttaaatagaagttccgaatatcatccacaccatatttcaacattgcaaaccgatcgattccaagtccaaaagcaaaaccaccgtaaacttctggatcaacaccgccggcttttaaaacgtttggatgcgtcatccctgcacccaagacttcaatccaaccagtttgtttgcagacactgcagccttcgccattacaacggaaacatgagatatcgacttcgacagaaggttccgtgaatgggaagtaacttggccggaaacgtaaatcacgatcttcaccaaaaatgtggtggattgtgtattctaaggtcccttttaagtcagccatcgtaatgttcttatcaatcacttggccttccatttggtagaattgatgtgaatgcgtggcgtcatcggtatcacgacggtaaacacgacctgggctaatcatcttgatggggccattagcaaagtcgtggctttcaagatcgcgtgcttcgttaggtgacatatgggtccgcatcaacgtatcttttgtgatgtagaaggtatcttgcatatcccgtgccggatgatcagcaggcatgtttaacatttcaaagttatgtttttcatcttccacttcaaacccggcaacgacttgatagcccatcccgatgaataaatcttctaaatcatcaatcacttgcgttaaaacatgcggtgtgccctttttaacaggttgtcctggtaaagtaacgtcaattgtttcgtgcgctaattgagcagcttcttttttagcttctaattctgctttgcgcgcttcaattgcttgtgctaaatcactcttaatttcgtttgcaaaagcccctactttaggccgttcttcgttacttaagtcccgcataccacgcaagacctccgtaattggccctttcttgccaagtacttctactcgaatctgattcaatgcatctaaatcaacaactttttggatatcttgcaaactcttttgttgcaagtgttccaactgttccttcaatgacatttgatttcctccttatttttgccaacaaaaaaagccccgtcctcaaaagggacgaagcttcgcggtaccaccctagtttatgacctagtcatacactcaagtttgcgtaacgggcaataccggactcaacggtcaactctgaaagtgaacttcacctaaactcaactgaataacttacagtctatgattattctccctgaaagttggttgttaggttactctttttcatctttgtctataaactttattttagcgtaaattcaatgattaagcaactagtcgttcgtattgcaccattggtcagaccaattatggaccgcatccataacaggtgctagcgattcgcctttttcagttagttgatattcaatcaacgatgaatcagcactcgttatgcgagcaacgatgcccgcttgctctaattctttcaagcgttcaactaacacacgatcactgcacttgggcacactatgaaccaaatgcttgaagcgctgtgcgcccccttctaataatacatcaatgatcagaccattccacttcttgcctaaaattgagaatgttttttcaaatttaggacagagttggaaggtctcttgacagtcagaattagcattttcttttacaatactcatcattactcacctcacacttattattaataagtgtactcaaaaaggttgcaaaaagcaaccttgaggattgggcatcttttatttgttggtttgtgtggccgctgattgatggcgtactttttgtttgaattttgaccacagtggcgaacaaaattcagtaatcgcacaataatcatcaactaatgaaacgatataactctcacgatatttaggatggctgacagttgcgccccacatatgtttaacaataatatctttttccattggtgacaattcagttaacttctcagcgttccgaagagcaatccgtgggtgcacataagcatgggtccccagatcaaacttcgtatcgcgccaatcgtaatagaacaaatcatgtaataagcctgcgcgggcaactgagcggacgttaagatgccacttcttggcaagctcgtagcttcgataagaaacactgagtgaatgttctaaacgatccgaatgatgatgctgtgtgtaatttgctaatttttgaacttcttctttttctaacaaatcggcgatcagtgccatataatctgcatcttgataccacttagctgttgcgttcattcaaagactcctgactgatttaaattcaaattctgccataagaataacagctttttgattaaaaaagaagtcatttgcttcaaaaaaaacgcttcattaagaaaacttaagaattagccttcaatcaatttaaacattaaaatcccggcagcaactgcaacgtttaatgattctgcattcccaggaattggaatgtaaaggttttgggtcgtagctgctaagacatctttggcaacaccgtttccttcattacctaaaatcaaagccatatcggcggtcttaggcacatcttgataactgatggcttcggggtttaattctgttccatataccggtacgtcttgtgagttgaatttcttcatccagtcgattaagttaccttgatagattggtaaatggaagtgactgccttgcattgaccgcaataatttaggattgtatagatcaacactcccattccctaaaaccacaccggcaaagccagcagcatctgctgtccgaatcatcgtgccgatattaccaggatcttgaacggcgtctaataataagtaacgacccgttaatttttcaggcattggtgtttctgacatctcaacaacggcaaaaatcccttgtggcgcttttgtttcgctaaggtgttgggctacttccggtgcgatttcaaaagtatcatcatataaaccacgtaaggcgcgttcatcaacgtatttttcggtggcaaagacttggcgaatcactgctttattttggatggcttcttgcactaaatgccagccttctaataaataagtattttctttacgttggtttttcttgacggttaatttcttagccgctttaatcttagtattttggttcgattgaatgtattccatgttgtgctccagtctatttagtactttctattatacgcgacttggcctgtaaattctatggggccagcgccttgctttttaatcgccaaatcaccgccaagcgattacaatggactagaggtgattaatatgcaaaaagcagtccaattagatgtatttggccgagttcaaggtgtcggcttccgctggacaactaagctggtggccgatcgattagggattactggcaccgtctctaaccaacccgatggttctgtcaaaattatcgcaatgggccccgatgccattttggaacagttcattggcgccattaaagcgtctccgacccctagtgggcgcgttgatcgtgttgttcaaacacccttggaagatgtgtcagcgtgtcataaattttcagttgtcggttgaaaaacgttgccccttacagtatagttacacttattgaaacttatcttgaaagggctaaatttatgaaaaattcaaaacgcttcgcaacacttgcgatgctagcaatgaccgttacattatttctatccggctgtatgccacaaaaaatgagtagccatcctaaagtcccaactggcttcatctatggttcatcctataaatacatcgccgtcccattacaacatattatggaacgcatcgctgatttcttcggcggcatcaatggttacggctgggcgatcatcatcatcaccttcgttgtgcggatgattttactcccattaatgcttaaccaatcaaataaaatgactgcgcaacaagaaaaaacgcgtcgtttgaaaccacaattagatatcgttcaagcacaacaaaaggttgccacaacacctgaagaaaaagccgaattaagccaattaatgatgaaggtttataaggaaaatgattcaagtatgatgcctagccttggctgtttaaccttattaattcaattaccaatcttctctggtttataccaagcgattcaatactcacccgaaatttcaagtagtcatttcttcgggattggcttaggtcaacccaatatcattatcaccattattgcgaccctcttttacgttggtcaaagcgccctctcactagttgggatgcccgctgaacaaaaaaaacaaatgcaaacaaccgtccttatgagtcctgcgattacattcttcatttcgttatttgcaccagctgggttagcactttacttccttgccggcgggatgattatgattattcaacaaatgatcacaaccttcatcatcatgccccgtgttaaaaaacgtattgatcaagaaatcaaagaaaaaccaatcgtcacagtcgtcacaaaagacatgttcaccaaaaaagcagctgctaaagcaactgaaacacctgtgacaccagaaaccacgcacaccaataaggcaacgatgccttctgaaacaggcaaacgtaactcaggcaaacaacgccacaaaccacaagcataattagaaatactaaaagaggctcagacaaaataattttgtctgagcctctttttgatatccgaatattgatggtttaaacgtgcttttgtcagtaactttctgtgctttgctaaacttatcaaaccggtgattttatcaccaattcgccaagttctgcaagtgctcaaaagctaaccactgacaacacactctttttttaatcagcatcttcttctggtgcggcctttgtttctctaacgagtggcaattcaatccggaagaccgacccatgtccgacactactttcaagtgagacattaccatcgtagccttcaactaattgttgggcgatagctaaccctaaaccattaccgcctttttcccgactccgagccttatcaacccggtagaaccggtggaaaacctttttcttatcttcttccgaaatcccttcaccaaaatcttggacagcaacttgcgcataacgttcatcgttagccaccgcgatatgaatttccttgcgcgtcgttgaatatttaaccgcgttatccaatagaataatcatgatttgctcaaggtggttccggttaatattgactaaagcttgaccatgcaaatcatcatctaaaataaacgtaaattcaggatagagcatctcaaaattatgataattttgtaaaacaactttcccaacatccgtcacctcagtggtgccttgtgtcaccgcctgatcagcccgcgttaaatctaacatttcttgaatcaagttcttcatccgtaaaatttcttgcaaagaagctgctaaagattccgacaagacttccggatcatctttgccccaccgattcaataattggaggtgaccttcaatgatcgcaaccggggtccgtaattcatgcgagacatcgctcacaaattgatcttgttgttcaaagtaatgctgaatccgatttaacatttcattaaacgcaatgaccaggtccgaaagttcatcttgactccgcctagtttccggaatccgcacattcgaatttggttcaacattaatagcttcaatcgtctgcttcattgcctcaatcggctgcaagaaacgattggctaataagtaaccaattacagcactaaacaacattgcaaataacacaacaaccaccagaacgatccgtaattccagcatcgcatgattataatcccttagattattagtcacttcaacataaccgatggtgcgattcgtgttagcagtcttaatggggcgaatccccattaaatgaatcttcccaaaaatatgctcccgctttaagacatcggtgtcttgctttggaaaagaggtggctcgaccacgtgaggcgaataacccttgccgattttgatcgtaaactttaaccgtcgtatcctgctgtgccaaacgcattaaaaccgaatcttgataaattgctttagaatctctaggggctggatctaattgttcagcaacaaattctgatgttagcgtcttttccgggcgccccaaacgttgttggatgacagtcactgtatcgtgaacattatcgacttccttatgcaataaaatgttcgaaatactactgaaaatcacaattgaaaaaatcgcaaaggtgataaaaatggccaacccaactgcagctgcccatttcacctttaacgatattttacgacccttattattattttcactgggtgtctctaagtcatttgttatcacgagcgcatcacatatccagttccccgaacggtttgaatatagctttgttcgcccgttcgatcgattttattccgcaaataacgaatataaacatcgaccacgttcgtttcaacgtcggaatcataaccccagaccttgcttaacaagacatcccgcgctaagaccacgttaacgttttccattaaggttaatagtaattcgtattcacgtttcgttaattcaataatatcatcaccacgacgaacgattcggttttccttctcgactgttaaatcgcgataagtcaccgtcgtttgtttggcagcgttatgttcgccttcaatatcgatccggcgtaacaaggcgcgtagccgggctaaaagttcttcaatcgcaaatggtttaacgatataatcgtcagcaccatgatcaagccctgatacccgatcaataacggaatcgcgcgctgtcatcatgataatcggtgtatttttaacttgtcgaacccgtcggcaaacttctaacccatttaattcaggtaacattagatccaataaaattgaatcccagtcttcgtttaaagcagcttctaaaccagtacgcccattgaaatgtacttcggtcccatagccttcgtgctttaattcaagctcaacaaaccgggctaaatttttctcatcttcaataattaatatgcgactcatttagtcactccctaaaaaagaaatttaatgtccacgctgaacgttcttcgtagataagaattctctaagaatcaactcgtcagtagtagccacttactcattcattttagcatagttcctcataaataactaacaaatctcgcttcaaagcacgtccccctgattatttaagcaccacaataacgcaattggtaacgcctcaaaaaaatccagacgaaaatgaggctttcgtctggattctttagattcgattaaaaattattgttctttgtaccatgtgtaatggaagataccttcgcggtctgtccgttcataagtatgggcaccaaagtaatcgcgttgtgcttggattaagttagcaggcaatacttctgaacgatatgaatcaaagtatgtgattgcagcggttaaaccaggagcaggcacaccttgttggattgccaatgccgcaatatcccgaacagcaccttgatacttcttcgtaatatctaagaagtaatcatctaataataagttatttaaatcagctttcttatcaaaggcatccgtaatcttttgtaagaaacgggcacgaatgatacagccggcacgccagattttagcgatttcgccgtagtttaatgaccagtcatattgatctgaagccacccgcatttgttcgaaaccttgtgcgtaactcatgatcttactgaaataaagtgcttgacgaattttttcaatcaattctttcttatcttcagttaacttagcaactgttggggcaggtaaaatcttgcttgcagctacccgttcgtccttcattgctgagatataacgggcgtaaactgattctgtaatcaatgattgtggcacacctaattcaagggcgctttgtgaactccacttaccagtccctttgttaccagcagcatctaaaataacgtctacgattggcttgtctgtgcctaaatcgtctttacgggtcaagatgtcagctgtgatttccatcaagtaactgtctaattcgccgtggttccattctttgaagacatcagcgatttcttcaacagataaaccaacaacgtttcttaacaagttataactttctgagattaattccatgtcgccatattcaatcccattgtggaccattttgacatagtgaccagcaccgttagggccgatgtatgtgacacatggttggccgtcttcagctttagctgacatttgttccaagataggggccactaaatcataagcttctttttggccacctggcatcattgaaggaccttctaaggcacctaattcgccaccggaaacacccataccaataaagttaatccctgatttgtctagttcggcattgcgacgaattgtatcgccgaagaaggtgttcccaccatcaattaaaatgtcacctttatctaataaaggtaataattcgttgatgacggcatctgtaccagcaccagctttaaccatcaagataatccgacgtggtttttctaatgatttaacgaagtcttcgattgtgtaacttgcgactaatttcttttcactatgatcttgtatcacagcttctgtcttagcaccagtccggttataaatggcaactgtataaccgcggctttcaatattcaatgctaagttcttgcccataactgccatcccgataacaccgatttgtggttgactcatgtaaaaggcctcctaataagttctaatttaatggtgtattatcttctcaaattgcttaatacacttaccctgattatgttagcagaattgttcactaaagaaaagcattttaatccatttgggccggtccattttataaataagtgcaaaaaaaagacgcccgtcttaatcggcgtcgttttcttgtgcttctaacaatgctttgagcttagctaattctggattaggtgcctcggcctcttctgcttgttgcttcgcgtattcttcttcagagattactgaccaagcttgaccagttggcatcacatcttcattttcttcttccggtgtcaaaatatgactgggaatgtgcaataggatatgatcttcaaccgccacttgcatatctaacatttcaccttctaatgggaataacatgtcctcatcagggaaacgtgacaattcttcatccgttgggtcaacataaatttcagtgaacgtaaaatcaagtgggagggccactggattcaagcttcgggttgatggcaccgttaattgcccaaccacgtgtaagtcagcaatgatggcccggcgatcaacggttaattgaccactgatgacaaacggcgtggctgccaaaacatcattttctctttcgtggagttgcttttctaaatcaactgtttcttcaaaagcaagcgggtgttcacgatgcttttgtaatgcttgtactgaccattttaacaatgcgcttcatcctttccatgataaaaaatcggttgtctggcaaagttttgcgactgccagccaaattgttcacacaagcgatcgacacggacttctaagcccaataaaccagtttcggcccccattttggcggaaaccttactgataatgggaagatcagtcgtcttcttcaactggtgtaagtgttgctgcccaatctcgttaaagcccaacaaacgaatataggtccgttgaagtccctgttgaatatccgctggttgaatgtttaataaaacatataggcaaacccgttgaagtcgggcatacgtgtatcgttttgtttttagagcttgtaataactcggtgtaactattggctttatgaatcacctttttgaaacggtattccaaaccttctgacatctggtagacctgccgtaattgtgccagcgacagactctcgatgcggtattttaagagtggccatagttggtcttctgtaagaagcgtactatccgctaaggctgctagcgttccggctggtacaacgtgttgtaaggctgctaaagcggtgccttgcgtcacaacctggcgaatcgcacttgcacttgcatatggcgccgttgaaacggtctggtccccatgttgtgcttgctcccgcttgatagccaataagtttaatggttgcgctagccgtgcgttagcgacggcgtaactaatccctaatagatggtttggttgatcaatctgcaaggataactgttcctgatagaactcgttcagctgtgttgcgtacgttttttgatagtcaacaaaagcagcagattgctcaggtaagtcgataatctgctgccccgcttgttgataatcaaatgtcggttgttcactaccaaaggcaatcgtctgacagccaagcgctgctagcagttgcaccgcccccgtggcaaaacgatctgctggttgcaccgcactcacaaatggtaattcgaccaccatatccgccccattttgcaacgctaattcagcccgcgtccacttatccaaaagggctgcttgcccgcgctgaacgtaattcccgctcatgcagacaatcactaaatccgcttgggattgctgacgtgcttgttgaagttgatagatatgcccattatgtagcggattgtactccgcaataattcctgtaattctcatcctaacctctatttaaccgcgctgaagaaccaacgaacactgtcatcttgaaccgcttcttggccaaaatcagcgctgactttaatttgtttaaagccgaccgtttctaaagccgctacaaagtcggccattggatacgtccgttcatgatgtaattcgtttaattcttggtaaccaccaagttgttcgtcccaaacgaagaaggttaaatcatgttcaactgaatgcggcacttcgccttcataactcgtccacataaaggccgtctcttcggtccggtcattatacatgaaaccggggaataaaacgtccatttgatagagtgaatgcgcatcaaataggaattgaccgccctctgccagttgttgataaacctgtttaaagacttgttggacctgatccaaatcttgcatgtagcagattgaatcgtcaaaacaagtgatcgcatcaaatgtgcccacctcgctaaggtctaacatgtcgccttgaagtaatggaaaactcacgccggcttcagtcgctttttcagacgcaatagtcaacatttcggttgaaaggtccaagccaacaacgtccaacccggcttgttttaaaaggatggctaaatccccggccccacaagcgagctctaaaacgcggtgttgattttgcaacgtttgtaatgtgtaatcgcgccattggccatataattcatgatccattaagcggtcatagaccgttgcgaaactttggtaaatcattcttccgttaaccattctgaaacatcaaccattggtgcttcatcccatagtttttcaaggttgtataatgcacgttcttctggcatgaagacgttgatgacaaggtcgccaaaatccattaagatccaacgtgaaccttttttaccttcaattttcttaaccatcaaaccagcttcttcttcagcatcttcaatagcgtccacaatggcgtctaattgacgttctgaagaaccagtcatcatcacgaaataatcagctaataaactgatcccttccatgtttaatgccacaatatcttctgctcttttaccgtctgctgctttaacagcaatttttaataagtctaaacttttcactaatgttctcctttaatgggcttgagttggcacccaagcattgtatgtgtcaattgttttaggataaatcttcttttgcccttcaattaaaaaggtcaacgtatttaaaatttcaaaccgcacgccagccgctaaatcagcgaaggcagtttcccgcgcttgtaccacacctggaaaatcacgacccggttcgatgaagtcagcgacaaataaaatttgatcgatgactgtcatctctggggcaccaattgtgtggcgacgcaccgcgtttaaaattgtttcatcgtgaatgcctaagtcacgttcgatgaagtaagcaccgacgacaccgtgccaaattgcattaccgtattgtaacaattccggatcaaagccagcttcatgaatcgcttcaataaagacttcatctggtaattgcttagcataatcatggaccaaaccagcaatcgctgcccgttcaacatcagcatgattaagctcagcaagcttaatcgcagtttcttcaacgcgtaaacaatgttgaaaccggctctcagataaattggcagccactttttgcgctagttctgcgcgtgaatacggcacaatattttcttggtaagtaaaatcactcacggtataacccttcttcctcaatataatccgccactttagtcggtaccaagtagcgaattgaacaactctgttgcaccttattgcgaatctgagttgaactaatatcgacaagtggtgcatcaacccacaacacgggataaggcgtgtcgcgactgtagcctgtccgttgaatgccaacaaactgcacgagttgcactaaatcatcaattcggtgccaagtcggtaagtaatcgaccatatcgccaccgatgatgaaataaaaatccgtattgggatattgtttctttaacgccacaatcgtgtcatacgtataactgacaccaccgcgttcaatttcagccattgataattcaaaaagtggattatcggcaatcgcccgtttgaccatttcaacgcgatgtttggcgggtaacgtttttttggtatcgacatgtggcggggtcgcatccggcatgaataaaactttatccaaacctaattgcgtccccacttgttcagccatgatgagatggcctaaatgtggtgggttaaaagtgccacccatgataccgacctgttgtcgttgtttatcttcgacaactaagacagacggttttgactctgatacaccgtgcactttttttaatgttgcattttgcatctcatcaccgccttattaacgtccgagcttagtaacaatcgttgaaattttttggtatttttctttacgtgatgccttataaatgaccaatgtccggccaattttttgggcaatttcaatccgattatcatgttgcttcaagaagttggctaattcatcaaccgttacctctgttgtttgcaataaattaatcttgattaattctcgtttttcgatagcttcttcgatttgttcgaaataagcttctgacaaaccattcttacctaattggaataatggttttgttgtttgcgctaatcctctaagatagtgcttttgtttacctgttaacacgcgcgttactcccttcgctaacctaaataagtgcttttctgatcatcactgaaacgccttttggtgcgtaccctgcgacaaccacattttctggtaatgtaatccagcctaaaccggcgaagactaaatcacttttttcttttgttgaaaattcataacgttgtaagtctggaaaatccgctaagtcttctggatgaggtggctgtaataaatcacctaactgtctaacatagaaattatccgcattttctaattttgttctgtggatgtaaagttcattatcaaagtaaccaacaaaaccgtgacgaggcccttgaagataatcaaaacgtgccaagccgcctaaaaatagcgtttgttgttcatttaattgataaactttaggcttgatttgcttttgtggggcaatcaaacgaagatccttatcatgtaagtaatgcgccatttgttgcgcgtgaataatccctggtgtatcaattaaagcatgatcatcttcatataatggaatatcgatccgatccaacgttgttcctgggaattgtgacgttgtaatcacgtcgctgtccaaaatcccagtttgtttgatgatgcggttaattagcgttgatttaccaacgttagttaccccaaccacgtatacgtcgcgaccttttcgttcccgttcgataactgctagtaagtcatcgactgagttcccttttttagcgctgaccaacatggtttcaattggatgtaagccatgttccttggcttctttttgaatccagttgatgacgcggttaggattaagggctgttggtaagatatcgaccttattgccgaccaagattactgggttatcaccgatgaaacggtgtaatccgggaatcaagctcccgttaaagtcaaagatatccacaacgttgacgattaaagcatcactatcaccgatttggttgagtaacgctaaaaaatcatcatcgtttaacttgatatcactgatttcattataatggcgcaatctgaaacagcgttggcaataaagctgacccgtttccaatccttttttaagggcagaattaggggtatagcctagtgcttccttatcagtcgtttgaatctgagcaccgcaaccaatacaaaatagtgcttcttcagtctgttgttgttcttcagtcatttaaatcctcccgccaagttaaatctgcgtgtttttttagtagttgttgcataatatatttttcaaaaaagcgattaatagaagtattccaagcgtcactatcaataattggtttcactaagattgtccggacaccggcaatattgcctgcgtgcatatcggtaatcaattgatccccaaccatcaccacttcgtgacgtgataaaccgagttgcttcttagctttcacaatcccagtcgccaatggcttattagctctggcgataaaaggtaattgtaattcggccaacgcgtgttggacccgttgttgattattatttgaaaccaccatgaccgtaatcccagcggcttgcatttgtgctaaccattctttgagttgcggcgtgccgtttgggttattccaagcaattaaggtgttatcaagatccgtcaaaacggctttaatgccttgtgctttgagttgttctggtgttaagtcatagattgcattaaccatccaagttggcttaaaattctttagcatgcatttgtctcctttaatctagtcactgactaattataggttatttagtaataaattgcacctttacgaggttaattatttgcccattctaattgcttttcaattttctcaacactttcttcacaatctaagtcaaactaatcgacatttaagcgcttttctggtacgtttaaagaaattgagaggatgtgttgttatggaaaaatttgggtttaatcattttggcggaccggatgtttttgaaacattgaatcaatcgcaaccagtgccaaaggcaaatcaagtcttgattaaagtactcgcatttgggcttaacccttacgatgttgcccttagaaccggttcacaacaaacagtgcgtcctttaccaatgccaatcgtccctgggacagatgtggttggtgaaattgtaatgcttggcgcagacgttaccgattatcgtattggtgaactagttattaatcatcgtccactcggcggttatagcgaattcgtcacagcttcaaccaacaaaatcattcgcaaacctgtcagcctcagcatcgctgaagctgctggtctcgcaagtgctggtattaccgcttataacacgttaatgcactttacgaactttaaacatggcgatacaatcgctatcatgggcgctagcggggctgttgggagtttactcactcaactcagcctagctgctcatttaaacgtcattgcaattgcacacagttcaaaccttgattatttacgatcatttggcgttcaagaaacaatcgcctatgaccaatcaggcgatttaagtcactttaaacaaacggccaagattgctgtcaacctcagccgcgatccaaaatcaactgaattattgaatgaacttgtccaaccagatggtttctttgcaagtacaacaatcatgccaagtgaagcagaacaaatggctggtgtcacttaccaatctgtctaccctcgccgtgactatcctgatttaacagcccttcaagatttaagtgaacttattgatcaaggcctattacacgtcacagtccttgaagaattacctttcacacttgaaggcgtcatcaaaggccatcaacttttagaaagtcaccatgcaccaggtaaaatcatcgtttcccgttaaaaataatgcaatttataaagaaagagtctcgaacaaaacgaagttttgtcccagactcttttttggtcttattaattatttgtttaatgcagctttagcagcttcaacaactgatgtgaatgcagcagcatcgttaacagctaagtcagctaacatcttacggttcatgtcgatttcagcgactcttaaaccgtgcattaattggctgtatgacatatcgttcatacgagcagcagcgttgatacgagcaatccataacttacggaagtcacgtttacgttgacgacgatcacggaatgcgtaacggtatgaaaccattacttgagtatttgctgatttgaataataaatgtttagcgccgcgataacccttggctaattttaaaatctttttacgacgtttgcgcgtcactgttccacctttaacacgtggcataagaatttcctccttgaataacaaacaacgtcaaagcgttgttgtagtgatctaatttttacttgaatccgaaaatgctatggcttatttaaggcctgataacatttgacggatacgtctcatatcgctatttgaaaccattccagattttcttaattgacgacgttgtttcttagtcttaccgtggaaacggtgacttgtgtaggcgtggctgcgttttaggccgccattacctgtacgtttaaaacgttttgctgaagcacggtgtgtcttaaattttggcatgatatttcctcctaataaatcagaaacagatttttatttttggtccttaagcggttctaacattaagaacatgctacggccatccattttaggacgtgctgtaactttagcgatgtcctctgtttctttagcaagtctttctaatacacgttgaccaatttctttatgcgtaattgctcggcccttgaaacgaatagaagctttcactttatcgcccttgccaaggaacttacgtgcattgttcaacttagtattaaagtcattttgttcaattgtgggactaagacgaacctctttgaggctaatggttttctgcttcttacgagcatcacgttgtttcttttgaagctcgaaacggtacttaccatagtccataatacgagcaacgggtggttttgcgtttggtgaaaccaagacaacatccatattagcttgttcagctaatgcaattgcatcctgtgtactcttgataccaagttgttcgccatcttgagcaatcaaacgtaattctcgtgcacgaataccatcgttaaccatcaaatcttttgctatgactcttcacctccataaaatttagagagaaaatgcagctaagcaccaaaaaaacggccccttcaacagaaaggcccgctattcgataacttaattcgtccgaattagaaactatcagcccagagacatcaagtgtctactaaggcgagaagcgggaacttctgctttatttctcaacgaaaataagtatactcggtttaagttttaaagtcaaggtaatcccaactgattttcagaaattaattaccatagtgattatcgattaattgtgttgctttcacttcatcaatattatgcgtaccagcaagttgcataacgagttctaattccttttgtaaatattcaaagacgttcttaacaccgatactgccacctaatgctaaaccatagattacaggccggccaattgcaacaatgtcagctccttctgctaaagccttaaagacatgttggccacgacgaaccccactatcaaagacgattggcacccgtttgttaacagcttttgcgaccacgtgtaatgagtcaaaggctgcagggccaccatctaattgacgaccgccgtgatttgaaacccaaatacctttagcaccggcttgaagggcaatttcaacatcttcagcagtttggattcctttaacgaagactggtaaatgtgtgtattcggaaataaatgcaacatccttaggattcaaacgttgcttagctgatttgtaaacagcatccattgtttggcccacacctgtttgataggcttcaacaattggcaaaccaactgggaaagtaaaatgattgcgcttatctgtttcacgattaccaccaactgtcgcatcagccgttaagacaattgctttcacattatgagacattgcttcgtctaatattttgcggttgatatcattatctttgctcatatagagttggaaccattgtggtgcgccatcagctgctgttgccatatcatcgatacttgctgaggcaaatgaactcatcgttaaaagtgagccatattccgccacccctttagcagttgccacttcgccttgcgtattaactaacttatgtgcggcaacgggtgccatgatgattggtgctgttaaatgatccccaaaaatttcggttgatgtatctggattttcaatatcttgtaagacgcgtggtgcgatatatttatgattaaatgctgtgatattttcattaatggtatagaggtcacctgcaccactatagatatacccaaaaccgcccttagggacaactttaccagcggcttcctctaattcatagagattgataatatccaatgctttttctgcagaacctgccatatatttttcagttgccataataaaacccccgttaattatcaattatgaaatcgtttacaactattattataccgcttttttgattgtgcacaactaaaagacgtaaaaaaaggcgttaaatcaaaataaattgatttaacgcctttttaaggatgctaatcctcagaagctacccgctttgaacgcactcttttttgaaacgtgcttttacaacttgattcctgcgctttgcgtcacctatcaaataagcggtaaataccgcttattcgctaggctgtgcaaatgctcagaatcaatcagttgtaacgcactctttatagattaatcttctttgtgtgttgtttgccgtctcggctatagttaccaacttctgctacgattgcgttgataaacatgtctgaggcttcttcaaccgcattttcttcaccgtatttacggacagaaactgttgcttgtgcaagttcttgatccccaacaactaatgtatatggaatcttgcttgtttgggcttcacgaatcttataacccattttttcattacgatcatcgatccgaacacgtaaaccgcgtttgatcatttcatctttgatgtttttagcgtaatcatagtgaagatcgttcttaactggaatgataacagcttgtgttggtgctaaccatgttgggaaagcgcccttgtagatttctgttaagtaagctgtgaaacgttccattgttgacactaaaccacggtgaatcataactggacgatgcatttcgccatcttcaccaacatagtgtaggtcaaaacgttctggcaacatgaagtctaattggattgttgaaagtgtttcttcattccccatagccgtctttgtttgaacgtctaatttaggaccgtagaaggcagcttcgccttcagcttcgacatagtctaagccaagatcatccatagcgcccttcaacatcgcttgtgctttgttccacatttcatcatcgtcgaaatatttttctgtgttagcaggatcgcgataacttagacggaatgtgtaatcattgatgttaaagtcagcataaacatcgatcattagccctaagattgatttaaattcatcttgaatttgatcaggacgaacgaatgtgtgaccatcatttaaagtcatttcacggacacgttgtaagcccgaaagtgcacctgatttttcataacggtgcatcataccaagttcagcaatccgaattggtaattcacggtatgagcgtgggtgatgtttgtaaacttggatatgtgatgggcagttcattggccgtaattcaagcatttcgccatcgcccatgtccattggtgggaacatgtcttcacgatagtgatcccagtgacctgattgtttgtacaagtctaagttagccaagattggtgtgtaaacatgttcgtaaccattagcaacttctttgtcaatgatgtaacgttcaattgaacgacgaattgtagcaccatttggtaaccagtaaggaaggcctgcgccaaccttaggatcaacgaagaataagtctaattgattaccgataacacggtgatcgcgttccttagcttcttgacgacgtttcaaatcagcatcaagttcttcttgtttaggataagctgtcccgtaaatccgttgtaacatttggttacttgatttaccttgccaataagcaccagcaactgataataattcgaagaatttaacgtcactgactttacctaacattggtgctaagctaaagtctgagtagtcacctaattggtaaactaaaacttggtcagcttcaacttcgtctaataaagcaagtttataagtttggccggcaaataatttcttagcgtcatcttttgaaacactgacacgtgaaattgcttcacctgattggattaatttagccatttctgttttgatttctggtaaatctgttacagcaacttggccagcttcattatctgtatcgtaatagaaaccatcttcggttgccgttacttcaccaaattgcatttctggatagtgttgacttaaagtagcagctaatacgaaagctgcagtatgccaagtggcagttaggttaaccgcttgatcatctttagtgatgatttcgattgccccgtcttccaaaagtggttgttgtaaatcaaccacttcaccgttaaattttccggcgattgccttttttgccaagctcgtactgattgattttgcaacgtctagtaaacttgttgcttgctcaaatgttttttgagcaccatctggaaaagttaattgaatttctgccatgcttgaacactccttcttatttttgtaatcaacaataaaaaaagtccctgagacgcatacaaatatgcacctcagggacgaattgatttcgcggttccacccagattgagaatcaaatggtgattctccaactttaagcgtctttaacggaaacgacccgactaacttaagcctctagaaagtggtcaattaaatgtccttatgaaaaactttcagttatgtttttctccctgatcaatattgccatttaaaaggtatctttcatcgttgattgactctattaaaacacttaatctgactttacgcaagtattaatttgattgtaaacgtctattttgaccgctgacttcaacctcacgggctaaataacgcacgcgttgcataattcgaccagcctttaccggttcttcatcgccgcgttggctagttgttaaatgtttctccaattcgttcatcgtaaaattagagctgaagaaagtcgctagttgttcttgcatccggtattgcaaaataatgcctaatacttcatcccgaacccaagcactcaaggcatccgcaccgatatcatcaatcattaaaattggtgcttttttaatttggttgaccttttcgaggacgttattttggccaatcgcatttttcatctcaactgcaaaggttggaaaatgaattaacgtcgtttcaaagccttgcagtgctaattcattagcgattgcacccagtagataagtcttaccaacaccaaactgcccgcttaaatataagccttgatgaaaatcagtgggtgcttgccgataagcttcgacaaacttcaacgcttcgattaacggcacttggcgctcactggcatcatattgtgcgagactcgcttcgacgatgtccttaggcatgttaatcgacttcacacgggccttcagttcggcttgtgcgcgtttttgaactagatccgccgttggttcataactaacatcgataaagtggttactcaacaccaacttaggcgcatagcctggtgccaacgttgtttcaccgtttaaaattttctttttttcattgacgtattcatagattttagccgcactgcgcgccactgtttcttgtgatagggcggcctgattagcctgaataaaggcctgcacatcaggatcttgcaaggcttcttcaactaatttattaaagcgttgattcaggcgttgccggttcatatagtcggttaaatctttgcccatattttccattatgattcccgcccttcacggattttcttgagtaattgatcaatttcttgctgatccgccttacttgatgtggtttgtggcgcttgataatcagacttggcccatttaggcacagtttcttgcttggtcttggcttgatagcgcggttgtcgtttagtttgtttcgtttcttgtttggtttggaaatcacggatttgtaaaatagcgtcagctggcgtcttaaccccttgttgcgcccattggttggcgattcgatctaacaaagcttgtgttaggccctcatactgactaatgatgtaaaccactaagatatttaaaacatcgttgttaaagatatagcgattttgtaagtcacgtaatgcgcgaatttcatttttcgccacaaagccatgatttttttgcttaagatattccaaataatcaactggtaaatactgctgactttcggttaaccactgcatttctttttcattaaagccggctttttgccattctttttgcagcgtctcaagtggttttttagccggttgttcactgttattttgaacgctatgtcggcgcgtatagttattcaaaacgttttgttctaacgcatccatattgacccgactgtcggcaacatccatggtgaggccgattaagcgtcccaattccatttcgtctaatccgtaaaaataatgcaaattaaataatcgttgctcattacgtaaaatttcatccgtatcgatttgattctgtgcaaccacttcttgtaataaagcccaatcaaaagtgcgcaactcaactgacgtgaaacttggtttttgcgcctttttttgttgatacgtactttgtgcctcagcaactgccgtaggggccgttgttaaatgatcattttgaacgtggaaaaccgtcaagaagttcttcgtgacctcttcgtattccttagagcgcactggttgtagtttaaaatgctctctcaattcaataaaccgcttctcaccgactgattcgtataaaatgacactcaacaaatcatcattgaagaaaatatgtggctgcattggtgcgtataattcatacaccagattgcggcccgtattgttattcttctgataagtccgcattaaacctaacgcttctaacttattgcgcgcgtcataaaaagccggcaaatcaacccctaataaattcaacaaggtcgcatgcgtttggaaagtcgtttgactcttggcctgtgttgattggctccataacaaaagatagagactgtacgcgacagcccccatcagtggttggtataaataggtgacgactgtttgatcaaaatcgctcaaatagttagcttttgtcaccataaacccatctttaggacttaaataatcaaatgcatctgacatccgctaactcctttcgactaatcttggtctttagccttttcttttttcatcatttcttgcaattccgccataaagacattcatgtctttaaattgacggtagacactagcaaaacgaatataagcaatttcgtcgacgcctggtaaaacggccatgacgtattcgccgacagcttgtgacgacacttcgttttcgcctaatgccctgattttattttcaacttcatcaacaatttcagtcatttgttccatcgtaacaggtcgcttttcggcagcccggattaaaccacgtaataatttatcgcggttaaactcttcacgggtcccatttttcttaatgactaataacggtgtttgctccaccctttcaaaagttgtaaaccggaattgacaattttcgcattcgcgacgacgccgaataacgcgtccttcatctgttggtcgactatcaattacccgtgaactattttgatggcaatgtggacatagcataaagacaccttcttatcttttaatttaaggaatattaattgtattttactattctaaacagacagtataacaatattataacatgacatgcaacagagtgcctatcgcaccgggttacttttgagtatttactgagtggtgtgaataagcgacacagtcgattgttcgcacaccgtggtaaagcacaaaaagttgatgcgagaggcacgttttaaccagcgtgcgttaccaaccgggttgattctgaggattagcagcgttaggcgaataaccgatgcaatcggttgtttgactgacatcgctaaccacaggaatcaggttggtagtccacgtttcagagtactatcgcaccgggttacttttgcgcatttactgcatggtgcaaatagatcaaaaaaggagctgggacaaaagtaattttgtcttcagctccttttcggtatccgaacattggtggtataaacgtgttctataagtcatattcttccggttaaccctgaatgtcaagcgattgcttccagcaatcattcaccattctgtgttaatcctcaggacatacccgacttatggcgcacgccttccaaaactgtctttaattgggctttcaattgatccagtgagccttggttatcaatcacgaagtctgctctatcccgtttttcagccaatgatgcttgactgttaatccgtttcaaagcatcttcgcgacttaattggttcctagcccttaatcgcgctagttgtttttcaaccggcaaataaatgactaataccccgtcgcaaaccgtttcgtagtgctgttcatataacaacggtaagtccaaaacaactagcggtacttggtgcgctttggcctgagccatctcggtcataatcgtctcccgaatgaccggtgctgtaatcgcgttgagttgcgctaatgcggcttgattaccaaagaccaatttgcccaaagctgcccgatcgacctgaccatcttgtacaagctgcttcccaaaagtggcttgaatttgtgcttgaacactttgattattagccaacacttggtgtgcgacttgatccccatcaataataggaataccttgttgcgctagcatttgcgaaactgttgttttaccggtagcaataccaccagttaagcctaggaaataagtcattattttgcattccttttaatctgacactttggacaaaaatgcgtcccccgctgtgccactttaattttctcgattggtgtcccacatcgttcgcaaggaaccccttttttgccgtaaacatgcagcatttcttggaaggcgccagcatgaccggtcgcgttcaagaacgtgttaaccgttgtcccaccatgattaatcgctagttctaattcggcaataatttcatcgtggaggcgatccgtttcagcacgcgtcaagtcattggctggtgtttctggatgaatatggcttaaccacaacgtttcatcgacataaatattgcctagaccggtcacaaccttttgatccaataacaatggcttgatagctttgtgatgtttttgcaaccgttgatagaagtccgcctttaaaaaggtcgtcggtgttggttccggccctaggtccttcaagccagctaccgtattttcctgacaggtctcaatcaactgcatccgcccaaacttccgcgtatctaggtaacgcatctgttgcccatccgtgaattcaaaaatcacgtgcgtatgtttggaaatcggtgcctccttggcgaccacttcatacttaccttccattcgcagatggctgacaacagttagctgttctccaaaacgaatcagtaaatatttcccccgccgatcaacagctgtaatctgttggcccactaatccagcagtaaagacttcatctggattaacaatgattttcgaccagcgaatatcgattgctgaaacagttttaccaaccgctaaggtttcaagtccccggcggacattttcgacttctggtaattcaggcattttccgtcaccttatttcttaatatcgtaccaagttgggccaaaaccactttcgaccttcaatggcaccgctaacttaacggccgaatccatcacacttgggactaatttttgtaagattggtatttcttcagttggtgcttcaaaaatcaattcatcatgaacttgtaataacattctggcttgcaagttcgccttcttcaattcttgttgcattaaaatcatcgccactttgataatatccgcagcactaccttgaattggcgtattcatcgctgtccgttctgcaaaagaacggaggttaaagttcttagcgtgaatatctggtaaataacgacgacggtggaaaagcgtttcgacatagccttcttcacgcgcttttttaacaatatcaaccatgaattgttgaacacctggatattgttcgaaataagcgtcgataaagcgtttggcttcttgccgcgaaatgccgatattttgagataagccataatcgctaatcccgtaaacaatcccaaaattcgtagctttagcttggcgccgcatatctggtgtcacttgatcggcaatgtttaagccaaagatcttcatcgctgtatttgcatgaatatcccggtcttctttaaaggcttcttgcatgttggcatcccctgagatgtgtgccaatacccgtaattcgatttgcgagtaatcagaagcaaacatttgccagtctgggtgacttgggacaaaggcttggcgaatcttgcggccttctgctaaacgaactggaatgttttgtaggttaggatcaaccgacgataaacggccagtttgcgtcaaggtttgtaagtaacgcgtatggactttattatcttgatggattgatttcaataacccttcgacatacgttgattgaatcttggcaatttgacgataatccaaaattgtttggacaattggtgcatccttccgtaattgttcaagtacatcaacagcggttgaatagcccgtcttcgtcttcttaatcactggtaagcccattttttcaaataaaatgacgcctagttgcttaggtgagttaatgttgaaggtttcgccagcttcagcgtaaactttttcttccaagatcttcaaggtttggctgaattctgatcccatttgttgcaggcggctggcatcgacccgaatcccggttatttccatttgcgccaatacgagggccaatggtaattccatatccgtaaagagatcgaattgttgatgttccttcaattgttcttcaagttgtggttgtaaatgataaatggctgccgctttttgaaccagatgttgatataacaaagcaggttcagttggaacagcccgtttagcacctttcccataaacggcctcgtctgtttgcacattttgatattggtgtaaattagcgaccgtccctaaatcgttgctgttattcgtcgtattcaataaataggatgctaataataaatcaaaatcaacgcctgctaaatgaacacctaatcgattagctgcgacttgcgtccgtttgacatcgaagactgctttaggatgactcgcatcttccaaccaatccttcaatactggttcagctagtagtgcaacatcatcactgacataccaatgatctggtgcgccgatataaaaaccaattaaatcggctgtgtgataattatcggttaacatttcaaccccgaaggcaaccggtgttttaatcgcttgaacggtttctaaattatccaacgtcaaaacagtatattgatagttttccgccggttcaaccgcttctggtgtcacgttcaattgctttaaaaagttttgaaagttcatttcttgataaaaagcaatcaacgtatcgatgttgggaccttcatacgtgatgtctgctaacgtcgtttcgatcggtgcatcccgcaaaatcgtcgccaattttttgctcataaaggcttgatcacgatcttcaatcagatgttccttcatcttactctttttcattgcatcgacattttcgtagaccccttcgatgctcccaaattccgttaagagtttcagcgctgtcttttcgccgacctttgtgacacccggataattatcagaggtatcacccatcaaaccctttaagtctacgatttgactaggtgctaagcctaatttttcttgtacatgttccggtgtgtaggcttctgtatcgttgacacctttgactgtgatattaacggtcgttttatccgtcgttagttgtgttaaatcacgatcacccgtcacgatgttgacaacaaagccgtcttgttctgcttggctcgccaacgtcccaataatatcatcagcttcatagttggctaattcagccgtctgaatgccataagcatgcaatagttccttgatataggggaactgttccgttaattctggtggcgtcttagaacgaccgcccttatagtcggcaaactgtgccgttctaaaagtcgttttgcctgcatcaaaagccactaagacatgtgttggttcgaaccgtttcaaaataatatctagcatgtttttaaacgcataaatggcgttagtatgtaacccatcttgattggtaaaactgtctaacacttggtgcatcgcgtaaaacgcccgaaacgctacactgttaccatcaattaataataaacttttttgagaacccatcgtgttcctcctaaattcgtaaagtcgctccctctattctaacaaagaaaagcaagactcgatactgatttgaccgtacaaaaaaaggaatctggtaaaaatccttaccaagattcctttcaattattttgcgtctggtcgattaaggttcattgataccatccgttcaaagatttctttactttgaccgatagtagcatccactttatccttacccacttcatttttgagatcattataaagatctaaatagtaataaagtaagtgatgataaacttgtaatcctttttcagttaaatgaacacggcgaatacgttgatctttttcgtctgattgttcagcgataaaggccatcttccgtaacgaacgacattggcgtgaaatggcagagcgactaacttgcatcttatctgctaaagcactattagttgtttcgttattgttattcttaatctcgtgcatcactaagaattgatcaaatgataatccatatttttgactttctcggttcatcgattcgctcaaattattgatgagccaacgatataatcctgcgaattccataaaatcggaccatgaatcaccgattaggtcggacttattagttgcatccatgtttttcctcctatatgtcactgcctcgccactcatccataactaagacaacttaccacaatctgttcacttactttaaataaataaaaataaagtaatcaaaacataatttattcatcttatactatgaattcagttgattaagcaacattcctttaattaaacttcaactcactatgacttaaagcgttataaacagtttatagtattaaaaactatatttcaaccaatttccctcaacttaataaaaagattagtgtcgttgactatttcgagcattatccactttaatatttagcaacaatatcaatatttttataattattaataattgcgtcaaaaaatcatatctgatttgatatgatttaagccagttccttgttcaatagcgggttaataaaccatactagttatcttctaacaactaaatataatattaatatttttattttaaccatcaataactaactagacttcattaggaagcgtcacagtaaaagcaagaacctgatgggtcaaatcccacaaattaactgtaatcgattgggggataaggccatcagtatcatagtgacagctagcttcatatttgaattcggtttcagcttgctttttgctcaaaataattcgtgtggctaattgttcaaaatcgtctaacgaataatgcgtccctactggttcccctggcacttgaacattatttagtaccaagcgataatggttattttgataaatgctatacaattgatttacccgtgcttgattactcatcatcaagtaattcatttgggggcgatcaccatgattcaaatgtgctgtaccagtaaataataacccatcaatattatcgccttctgaaagcgtaaaacgaaaaggcaacaaatgtgtgcgatgatacaaattaattttttgtccagctacctttacatagtcgtggctcactaaatcataacctggcgtgtaagcccgtttacgctgttcatcactgcgcttaacgataccggtttgaaccattgcttgccgagcccttaacatgccggtcgtcagaagcgcaatggccccaataggtcgtccttgtggcatttcagcgaccaatacatcaccaaggacaccaggtttatctaattgattcatggtctgttcaaaatgagctgctgttatgtagcgatacttgacttgcgcgctatccaaaagtgcttggttctggctagtatcatccacttcatcctggccactgtgatggcgtacaaattggtatagtgcataacctaaccaaatgacggccgcagcctccattaagggttgctgccaccatttcccaaggttatacaaaagcagcattcctaaatattttttcatcaactatccttttaaacgagattataagccttaaaataaatcataatgaagcatataccagtttatagtattaaagaacatgtttcaacagacatattattaaattaagtaaaattttgctaaatagactattaatgagctgaaatgccctttttttactaaaaaagcggccctaactagggctgctttaaatttatttaataatcgtaattgcaatatgacgtcgtccccaactgacgcattgggcaacacttgggaagtgaacatcaataatgtggcccttaatggcaccacccgtatcacctgcaattgcataaccatatcctggcaccaaaacaagcgaatttaacggaataacttttggatcaacagcaatacaattagggtttttcaccaaatcaatgcccgttgcgccgtagcgacttaagcctggttctgccgttgaataagccgtcgcttgcacttcaattgtctgtccgggctttcctttggcagcagcagctagcgcggcttgttgttgattattgactgctgataatttttggctagcagctttagcggcagcctcatttttcgccttagcagcggctttagcttgttcttcagcttctcgtttttgttcttcaatcttctttttactaatatcagcaagttgtttttgactctggctcaagtcttttttcatctgatcgacttgcttttgtaaatcagccgtttgctggtctaaatcctttttttgtttgtctaaagcggccttactttcttctaagtgtttttgaattgtcaccattttctgataactagttgctaaatcagtcatattttgattatccgcatcttgtagaatcgtcaaagtgtagacgcgactaaatagatcactcaatgaatcagccgataataaagtatttaagacatcccgattatcttctgatttttgtaatgcctgcaagtgggccttggcataatcttttcgttccgccaattcctttttttgagccgctaaaatcgtttcggccttattaatatgttcttcattttctgtaattttcgtttttaattgatcaacttcttgatatttagtattcactttggttaacgtgctttgaattttaccgttgatcgtatcgatacttttttgtgtttgatcttcttgttgttttaattcactaagactggcagcgctgactggtcctgctgtcgtcacaataatcatcagccctgtcagaatcattaaaccgattttcttgaattgcatcttgcttaagcccccctacgttatcgctattccagattaattatacagaataacgatggttaatgctattacgttttagtgttaactattacaaatttctcgtcaagaaaataaaggtgtttgtttagttcacttcaaccccctatagtaatgattaaagcgtaatccttcaagtttttttacaacactaactaaaaaagaggtcggacaatatcgtccgacctcttttaattagcgttttcgtagtgctcttgccatttcacgatcttgttccttacgcttgagtgtttctcgtttatcgtattcccgtttcccttcaccaacgccgattaagaccttagcaaaaccgtgttttaaataaacacgtaacggaacaattgtaatccctttgtccttggtcaaagcaccaattttagcaatttcctttttgtgtaacaataatttccggttacgcaatggatcatggttaaattggttgccttgttcataaggactgatatggacattttctagataagcttcgcccctacgaacacgtgcaaagccatcacgcaaactaattttccccttacgaaccgatttaatctcggtcccagttaaaactaaccctgcttcaaatgtctctaggatattgtaatcatgcccagcttttttgttttgtgcaatcaaattagctggtttttgtggatgtttctttgccattcaatcacctactttttaaaagtacgtttttgtgagtcctttttagccactggtcgtcttggatgactgtttttcttttggtcaccacgtcgttgaccgcctttttcatggtctcttgggcgagttgggcgcttaggtcttgcttctatcttactcaaaatttcagcagaagccaagggaacttcctcgcttgctaataattcgaagtctacagaatgtgcatctaagtcaacattagcgactttaacccgtactggttggccaattcggaacattttatgtgttctttcgcccactaaagccaattgactttcaacaaagctatagtaatcatctttcatttgagagatgtgtacaaggccttcaaccgtacttggtaaggcgataaacatcccgaagcttgtcacggaactaataacagcatcgtattcattaccaaccttatcaagcatgtattcagctttcttaagatcaacaacttcacgttccgtatcaattgagcgtcgttcctcaagtgatgtttgttcagcgattggttgtaacttaggtgcccatttttctttttcttcaatcgtcatgccgttagtagcatagttatgaatcaaacgatggaccattaaatcagggtaacgccgaattggtgatgtgaaatgcgtatagaattcagcagccaaaccaaagtgaccaagtgattcatctgaataatgtgcttgttgcatacttcttaataacattgttgtaataatgggttgttcaggttgaccttcaatttgcgtcaagacttcttgtaacatcataggtgttacttttttgcttgagccctgaacttgaatgccataagcggtgataaattcgaagaagttcttcatcttatcagcatctggtgtttcatgaatccggtataagaaaggtgcattagccgtactgtaatgttcggcaacagtttcattagcagccaacatgaatgattcgatcatgcgttctgaaagaccgcgttgacgtaattcgatatcgattgccttaccgttttcatcaacgatgattttagcttcgtcttcttcaaagtcgattgcgccacgattatgacgtttcttcaagaggatttcgtgtaattcagccattgtttcaaacattggcaccaaacgtgcgtattgatcacgtaagtcagcatcttgatccgtcaaaatcttattaacattgttataagtcattcgagcggttgatttgataacacttgggaaaatgttgtgatcgaccacgttcccatgttcgtcaatttccatttcacaagtcaaggccaatcgttcaacgtctgggttcaatgaacaaatcccgttagaaagacggaatggtaacattggaatcacgcgatcagttaagtaagtacttgtcccccgttcgagcgcttcagcatctaatggggaaccttcggtagcataataactaacgtcggcaatatgcacgcctaagtagaagtgaccattgtccaattgacggacattaacggcatcatcaaaatcttttgaatcgtcgccatcgatggttacaactggttggtcggttaaatctttacggccaaacttatctgtttctaaaacagtatctggaatggcttctgattgtagtcgaacttcttctgggaaatctgttttaatatcatgttggtaaacaattgataaaacatcaaccccaggatcgtttttattccctaagacttgtttggcaatcccgcgcatttggccaggggtatcgatacttgggtatgacgtaatatcgacttgtaccatatcgcctttttgagggtgtaaaccgttgtctgttaagtaaattaaatagctgcttaattttttagcatggctttgaatgtaaccaatcaagccggttttttctttttggatatctgaataaggcatgaattcgccgacgatttcttcgatgccccgcgtaatcactttagccactttcccttcaggcccgcggcggctgttttcttctgcttctttgatgatggccacttcaacagtatcaccattcattgcaaagtttgtgtttggtggggcgataaaaatatcgggatcacttggttctttatcaaccattgagacgaagccaaaaccccgatcgttagcgtggaaaaccccttcgactaagcgttggctagctggtaatctgaatttaccggcatcatccattaaaaggtgcttgtccccttctaattcggctaatactttcactaaatccttgaacccttgtgagccggccacaccggttcgttcactaatttctgatacgtttaattgttgcgtttcatctgctgcaaaaatggctaagatggcagctttcatttggtcaacttgtgtcaaatcaacacctcttccttatttcttataacgtttaataaatacttcaacatctgcttctaattggtggtgcgcccgatcaaccgtaatcacgtgaccggcattgtcataccagtgataatcaactggtgtttgttgtgcttctaagcgttgttttaatgctgatgcaccgttaggatcaatcacttgatcttgaccaccttgaccgataaagactggcttatcaccaatctggtctaaatcggcggtgactaacgcgctaaaatcagcgattgcttgtagttgttgtggtaattgttgcttaatcttagccaattgaacggcttgatcagcggccgttttttcggtaatctgataaaggcgttgcgcatagcccacaaatagcggtgctagtttatcagttggtccttccagtactggcgcgctaaaaataccgccgcccaccaccgctggcatcgtttcgattgcgcgcatcgcgaacaacccacccaatgacaagccaaacacaaatagtggtttcttggcagcaacttgtaacttctgaatggcagccgttgtatccgcccaccaagcttgaacactaccttcttctaagatatcgagtggttcaaaagtggcgtgccccgtaaagtgcggtgcaagcacactgatttgctgtttctctaaaaaacggcccatcatatgaacatcattagcacttcctgtgtaagcgtgcaatagcaccacgccaactgagccactatcataatagtaaggttgtggtaaccgatactgcattcaaacccgcctccagtacttgaccgatttaattcatttaaaaaggtctcctgctatttgaacaggagaccgcatcaacgttcttattagaattcgatccgtcctacttgctttagtgtgatgataaataaactaatgcaattgcaaagacgaagaataaagcccctaaaacgacggtcactttctgcatgaaagcttcaaagccacgggccttttgcttaccaaataaatcaccagagccacctgataatgcgctcaaagcatcctgttgtttacttggttgcatcatgactgctatcacaatcaagattgaatcgattaataataagttcaggataagattttccaacctaactccctacctttctatctacactgtcttttaatactttagcataaaaagtagttaatcaccacttttttatcaattatttcacgagattctcatccgctttttttaaggtttgggcagcggcttcaatctgtcgccgcacggttgctcgtaagtgatgatcggttaaaatgaccaaggtgtcacccgcgcgaatcagcgtatcaccatgcggaatcaattccgtttcgccgcgccgcacggcaattaataaacaagtttccggccaagcaacatcgcggacttgatgatcttccaatggtgccccggcaaaaatcggtacttccaaacgatctttaaattgtgccatatcggttttgggttggccaattaggcgttgtaataacgacgcataaatcggtgcgccacccatcaaatcaaccacgacatacgcgactaacgataaaatcgccaacggcattaaatgggtgagtgtcccgaccatttcggttaccaataaaatcgccgtaaacggtgctttcccgatgccggcaaaataaccacccatcgcaaaaataattagattagggacataaaccggtgctaaccagcccaattggaccatcactaagccatagacggccccaattagtgcgcccagtgacaagatgggcaagaagatcccccctggcaagccagaaccatacgaaatcattgagaaaacaaaccgcaaaactagtaacaatgccaccgtggttaaagttggcacttgttggcctaattgtgtgatcaaaccattcccgccacctaagaccgttggccaaaagtaaccgatgggcaatacaagcactaacggcaataagccccaataatatttaggcactggtaatcgcttataaaactgcggtaaccaaagcaacgttttttgatagacgtagcccaacaacccgagcacaatccctaaaagaatcagatgccaatactgattaatcggtaaattatgtgtatacgtaatgtgcaacgtgggcgttaatccgaaaaaattcaatgagatgaagttggccccgattgcactggtcaatgcggttagccaaacaagtggggaaaaattatgatagatttcttccagtacgaaaaaggttccagcaattggtgcgttaaaagcggccgataaaccagccgccgccccaccagcgattaaaatacggcgatcagcgccgtgatcgtctaagcggtccgctacgccttgaccgactgccgcccctaattgaattgaggggccttcacgtcctaggaataagcctggcgcaatacttaaaataccaccaacaaatttgcgccaaagaatcgaccaccaagctagctcaaattcgccttctagttgcccttccacttggggaatccccgaaccactgatattaggttcttttttcaatagctgcgccacaaccaagcctattagcaagttagcaccgattatccacaaccagttaagtggttgactatgcaagctttgatacaacttaatcgttagtgctaagcccttttcaatcgcaagtcgaaacaaactgactactaagcctgtcacacccccgactaataacccttttaaaataaaaacaaagcgggttttattaaagcggctggcacgtctgattcgtccgttttccaatagcgttcatcctccaataacttttcttttatcctattataagctataaaacctgtaatagcttaaacaattttattcacaaattccttaatttaggattgccatttgattaaatttcgattatattcaaagtatacttataaaaggaggttgctcttatgcaatctaaatcgaaacagcttcgttggtataatgttgcacttattgcctttgtagcggtttggggtcttggtaacgtggttaataactacgcgcaacaaggtctctccgttatcacgtcttggattctgatcatgctcttatatttcgttccttacgcattaatcgttggtcaattaggttctacttttaaagatgctaacggtggtgtttcttcctggattaaagcgacaagtactaagcggctcgcttactacgctgcttggacttactgggtggttcacattccatatcttgcgcaaaagccacaagggattctcattgcgctcagctggcttttcaagggtaacgggaacttcgtcaacacgatttcatcaatggccgtttcggtcatctgtttggcccttttcttactcttcttatggctatcatcgcgcggaatcgcgaccttgaaccggattgggagtattgctgggaccgctatgtttgtcatgtcaattctgttcatcattctcgcagtttcagcaccttttatgactaaaggcgcccacattgctacaccagacatgggcaatattaaaacatacatccctaagtttgatgttaactatttcacaaccatttcaatgttagtgtttgcggttggtggtgctgaaaagatctcaccttacgttaacaatactaaaaatgccgctaaagaattccctaaaggaatgttagtcttagccggcatggtggccttttgtgccatcctaggctcatttgggatgggtatgttatttgattcaaaccatatcccaactgatttaatggctaacggtgcttacgaagccttccatcgtcttggtgttttctaccacgttgggccactctttgttattctttatgccttagcaaatacgctcgcacaagtgtcagctttagccttctcaattgatgctccactcaaaattttattgggtgatgccgatagcaacttcattcctaaaggcctttcaaaactcaacaaaaaaggcaccccaactaaaggttatatgttaactggggtcctcgttggtctcttgattatcgtgcctgccctagggattggtaacatgaacgaactttacaactggttattaaacttaaactcagttgtcatgccacttcgttacctctgggtattcttagcttatatcctcttaaataaacaacttaaaaaattcacgtcagaatatcactttactaagaaccctaaaatcggcttaatcgtcggtagttggtgcttcttcttcaccgccttcgcttgtttgatgggcatgattcctaagctttcatacgctgctaacccttcaacatggtggttccaattaagcttaaacatcatcacaccaatcatcttcattgcgctaggtatgatcttaccagcaatcgcaagaagacaaaaagcatagaagtgcgattaaaggcggttaacttccgagcattagcctagtgtcgtgaataagcgacttcagtcgattgtttgcgatacgtagctaagcacaggaagttgcctttaagcgcacgttatcaactctaatcacaactcaaaacagccgcccatcataatatgggcggctgtttttattaacttaatcttctatttttaaatcgttgccatggtcgctctgtataaagccaaccgataatcccgataatgacaatattacgtaagatgacccacactaagactattttttcatggttggctaatagttcataaggttggcggctgaaaacgccattcatcccaaacaaccacgccaaatataatgtaccgataacaaccagcggctttttaaaaccagcaatttggaccaattggttcttattttcaagtgataagcgtttataaatccaagctccaccccataacaatagacaagttactacgaacaaaccaatgattaacccagtttgttgttggttacgatacaaccggtattgcccgttacccattgttaatagcttagtgagtaagccaccattactatcagagtgaatactatattgttcacttcctcgactcattacaaagcttcgtgtatcactcatactagtaatagcaaaagaaagtgaacaaataaaaccaagaccaccaatgattaatgttggtaacttaccaattagtaatccaattaaacaaccgattgtaaaaatccctaacatcaaaacaaggctgccaatctcacgttggattagtgttgggatatttagctgaacgtatgacgcgtcaatttttaacttcagaactgaatagtagataacatctcctatcaacagactacttaataatgttcctattccataacccaatttcgtccagtatagccgtcgtcgcgaactctctaaactaaacaagaatgtatcaaaattagttcgtcgatcattggcaaatgttaagagccctgcaccaaaaacaatcattattagcacgatcatcgttggtgaataaatcataaatcctgactcgtaagtctgttcaaaaactggattagcttctaatctataagcctctaatgattgttttttgggatgacctttacgatcttcttgtagatatgactttggatgttgcttaaaatctttaataaactgtttcgaatgatagtattgatccgatgattgccatttatcaacaacagtcatacttctcatcccttgcaacccaacaatcatcacaaacaagccgaccaagtacttccaatagcgtaattgcataattttcattaactgtttttgcatttttactgcctccacttctaaacgaagacttgatagtcttgttcgttaattaagtttgcttcgaaaacatcctctaatgtaatcggtagtgcttcgcataaaacagggtccagtgcagccaactcctgttcaagcacatctgtatagtctgggaaataaacgaccatcacgcgccccgaaacatttaataaccgtcctttttcttttaccaacgttggaatctcgttggtttttaataccagttgtaacttacgtgctgtttggcggagtgtttctaaacgataatcgtgactaattgtccgatcctttaaaatcagtgtccggtcaatcaagggttctaattctgctaaattatgtgatgtaatcagcagtgaaaattgttgttcaccaacttgatcgagcaatagccggatcacatttttacgaataatgacgtctaagccatcaaatggttcatccaacaaaatgtaacgtgcatgactactgatggctaaaataatattgaataagccccgcatcccttttgataattgccgataattttgtttgagtggtaagcgatattgcgctaataaagtagtcatctgattttcatcaaactgcggataggcttgttggtaaaagcggccaatctgtaataacgttaaatttttgaaaaataagtgatcttcgtctaaataaaaaatttgggtccgcaagcgacgatcttcatcgattgaaacttgatcaatcaaaatctgaccaccatccaataaataatgactagctatactttttagcaatgtcgacttaccagcaccattgcggccgaccaatcccaagatttcccccggttcttgttcaaaactaatatcttctagaattgatttttgatcaattcgtttatgtaacttgttaattgtcagcatcttttggacccctttcaaattgtgcggttaaccattcactcatctcagcctctgaaacgtttaaataaacagcttctaaaacgagttcttgtaattgtgccttcagttgggcgattttaacattatcccggtcggtcgcttggtgttcagcgatgtaagtgccccggcctttaaccgtcactataatgccttgcacttctaacaatttataggccttgcttaccgtgttcgggttcatcattaattgccgcgccatttctcgaaccgatggaatttgttcacccggttttaaaatcccctgaaggatttgttccttaatcaataaaataatctgttcgtagtacggtttagcgcttgttttatcaatcatcatcaccttggcacctcctttaaatcaatcactgtattacactgcactattatacgtagtacactcttgcagtcaaccacaaaaaagacgctcaccaaaattattcgttttgatgagcgtctttttgttattcagattttatttttaaatgcgttgcaaaaaagtcggtaatcgtcgtcattaaggcgggttgcactaaatggcgctctccttggcccgtcataaacgtcacgttttgtgcatacgattgcccttttacctgccgttcaaaatcagccatttgattgtaggggattcgttcatcctcggtaccatgccaaaataaaacggggcggttcgcaagtgcgttcggctgttgcgttaaatcataggccgttagccaactcgtcaacaagccaagatcagccggttgttgtaagccgtgctgacgaacattatcgcggaccaagcgcgcatatgttaaaggggctggcgagcccataatgcaagccgccactttaatttctggatgcttcgtcaataaagccgccgttgtcatgccgcccattgagacaccgccaacgccaattaagtcgtctttaatcaggtgcagttgctgccaataatcgatgattaaactaaattccgctagattggtttggatgctctgccaaaaagtccatgacggaatttctgatactggctgcaaccgttcaccatgattaagtgcgtctggtaatacgacgcgcatgccagcttgcgctaatttacgcgcctgtgtcaggaccaattccttggccgaccgccaaccatgataataaacaaccagtggtaatggttcatggcgtgcgttttctgccacaacttctaacaccggaatgcccttaatctgccgctttaatacaagtgccatcccaaaatcccccttttgaaaagttcaccattactatagcggattatgaaggaaaagtcgcgtgtggtgtatccaaaaagaggaccagacaaaattaatttgtctggccctctttaatcaccaacacccggttgctggtgattttgaaacgtgctttttaaagctgattcctgtgcttagttacgtatcgcaaacgattgcctctagcactcattcacgacactaggcaagtgctcaaaagctaccaattaatgacgcactttacatttcttttggtgcttggacgcctaataggtctagggctgtttctaatacgatgctgacactcttcactaatgataggcgagcgtttctttgatcgtcgtctgccaaaatcttagagttagcatagtatttattaaatgcttttgctaaacgtaatgcatatttagcgacgattgatggttcgtattctttacttgcgcgtgcaatcactgctgggaagttgcttaacatcttcaagacatcccaagcgttatcgtcagcaacgactaattgatcgtctacaacgacttcttggttagcttttctcaaaatactttgcgcacgtgcatttgtatattgcacgtaaggacctgtttcaccttcaaaacgaaccacttcttctaagtcaaagtcgaagttgtctaaacgatcgttcttcaaatcgtggaagataacagcaccaataccaacttgtttagcaacttcttcacggttaggtaaatctgggttcttcgcttcaatttgagcaccagctaatttaacagcgtcgtttaaaacttcttctaaaagaattacgcgaccactacgagttgataatttcttaccaccttgtgtgattaaaccaaatggaatgtgatggatttcgtctgaccagtcgttacccatttcttttaaaacagccttcaattggttgaaatgttcccgttgttcaccaccaacgacgtacaatgattgtacgaagttataagtgtcatgacggtacattgcggctgccaaatcacgtgtcatataaagtgtggcaccatctgattttttgatcaaagcagggtttaagttataagctgttaagtcaacgatttcagcaccgcgactttcttgtagtaagccttttgattcgattgcttccacaacagcatccatcttatcattatagaaggcttcaccgttatatgaatcgaattcaacacccaacatgtcataaatcttttggaattccttcaatgattcacttctgaaccatgaccagagttgtgttgcttcttcatccccggcttctaacttccggaaccatgcgcgcgcttcgtcgtctaattctgggtgttccacgtcttcttgatggaacttaacgtaatatttcaaaaggtttgtgatagggtctttcttgacttcttcttcactcccccattttttgtaggccacgattaatttaccgaattgtgtgccccagtcacccaaatgattgattttgattgggttgaaaccaaccttcgtcaaaatcttagcaattgagtttccgataacagttgaacgtaaatgacccattgaaattggtttagcgatgttaggtgatgacatatcgattggcacgttaccaccatgacctaaatcactttcaccgtatttagcagcttctgttaaaacggtcttcaagatttggtcgctaaaagcagccttgtctaagaagaagttgatgtaagggccgttagcaatgactttttcaaagccagcaacgtccatttgatcgactaaatcttgggcgatttgttgtggtgccttccgtaatgttttcgctaagataaatgttgggaatgcataatcacccaaatctgatgtcttaggtgtttcgatgagttgtgcgattttctctgctggtaaactgtcgcctaaaacgccagttaatgctgtgacaacttgttgtttaaaatccatgttaatagcctccttaaattttcgaacaaaaaaagtcccttccaaataaatgaaagagacgagaattcccgcggtaccactctgattgatcaatcgatccactcaatagtatgcaattgttcaaccaaaagtgcgccacattagcttgattatccggcttccaccaatcccggactcgctattaatcgctgctaacactattcttttgactgttctaacttgactcctagtatatagaagtcctgttaacatttcaaccccaattattcagcggataaggcttcgattgggtctaatttagcggctttacgtgatggtgcgagcgctgctagtaaactaatcactatactgataacaatcccgaagatgacataaccactggtaattgccacaattggcatgtgcgtcaacggttgggcaatcacgttaaccaatgcttgaccaccccaggcaattaaagcccctagaatacttgagaagaggccaatcaagaaagcctctgacatgaataagtgacgaatatcctttttacgtgcaccaatcgcccgtaaaataccgatttctttcgtccgttctgaaacactgatgtagaggacgacgataatcatgattgctgaaactaataatgaaatccctgcaatcccagctaagacgtagaaggctaacttgaggtacgtattgattgaatctaagatcgcaccgacaccggtaatttgataatctttttgcgttttaccatctaccttactgtcgtaagctttgatcttattttgaaccgctttgacgttttgcgttttattcaccgtaacagcggcaaagttaggttctaattctaagttttgggcttgatacatctttgctaaagtcccataagtaacggcttcagtccccgaattgataatccctgagaccttcacatcttgacgcatttgaactggtcgttggtctttactaattgcgttgacgtatacagttaccgtacgaccaaccatcttcttgtaatttttcttatctaatttcttggcagttgccttcgttaaaagaacttcgttggcgcctggttttgtcccggttttaatatcttgaacccgttccgtcttattaaaggtttggaacatttggattgtttcactcttcttttgatagtgaacttggacaccatcggcataatagcccttttcaacctttgtcacatctttaatcttatcaaagcgtttaatatctttatcggctaaatttccttggtcaccatcttcaatttgcttttgactcacattacgagcaatttgaatcgtattaggattcacttgggatgatacctgatcgttgatgtacccggtcactccttggcctaaacccaacattaaaatcactgagaaaatcccgattgaggcaccaaaaatgattaacaagttccgtttaatgtcatagcgcatatgttgcattgccattttaaaagctgacatgaagctcaatggactattcttcttaggtgttgattcagctggtgctggataagcatccttgaggcgcttatcataatcgatttggccatcaaccatgtggacaacgcgtgtgccgtaatctgcaacagcttgcgaatgcgtcacggcaataacgagtttcccatcttcggcaattttttgtaaaatcgccaagatttcagcggtattttggctatccaaagcaccagttggttcatccgcaataatcacatcaggatcagcagctaatgcgcgagcaatggcaacccgttgtttttggcccccagatagttggttcggatgcttattaatatgttccttcaaaccaacttgttctaataaggcagttgcctttgcaacccgttccttatgcgacaaatcggtcatttcaagtggtaccataacgttttctaagttggttaagtgactaattaagttaaaactctggaagatgaagccaattgtctgactgcgataagcatcgaacttcttttcagaagcattcttcaatgattcaccatcaacgattaattcaccttcatattgatgatccaaaccaccaataatgttcagtaacgttgatttaccgccaccagattcccctaagatcgatacaaattcgccccgatcaaacttaagattaatgccttttaaaactttaaacgcttctttattcacatggtaggacttgtgaatatctttaatctctaataatgtcaattgactacactcccactacttatagtaccctatgtttattccccagggctttgctcatgaatctactttaccaaaccgactttgacaaacaatcagtctaaagtcttaaaaatgacagcctgtcatttattattttttagctgttctttacgcaacttttcaagattgcatcattatatcattttgatggccaatcggacaaaaaaagaagccagaccatttcggcctagcttcttcaataattattcaactgttattcatgaagcgagtgacgggaatcggacccgcgacgcaagcttgggaagcttgagttttaccactaaactacactcgcattactcacttattgtagcataatctcctagatttgtgaatatttttttgaaaaaatgattcaatgacttaacaggcaccccttcggtaatgtatactaaggctaacaactcaaagattggagtcctattgatgaaagattctcaagaaacatcacaagaactttcggaatcatcggcttttcattgtccagcgtgccaagcctctattgattacggtatcaaacgctgtccgagctgtcagactgccatcttttatcgtgatatgtctgaaactttttggaatgatcgcaagattaagatgttcaaacaaagcgacgcagttcaccacaatcactaacttaactataaattaagcgtagacgtcacgcaaaagctattttgtgtgatgtcttttttagtgcttataatttttttaatgtctaaacgtgttctatcagtcatattcctgcgtttaacgccgagaggtaaacggtgacttccagtcaccattcacctccctctgttaatcctcagaatatctccgactgatgacacactcttcttttttagtgcttaaaaatttaataccaactttttttgtaaccgtcaccacactatcaagcgcactactggcgcctgtttttttgctaaaaatccatttgtataccactttgatggttgttataatagcaaaccatacacaggaggtctttatgttagaaaagaacaaaatgagtttattcagcttagtcatgttaggactaagttcaatcatcggttccgggtggctatttggtgcttgggaagcaaccactgtcgcaggaccggctgccattatttcgtgggttgtcggtgcgattgtgattggtgccatcgcctttaactacgtcgaactggggaccatgtttcctgaaagtggtgggatgagtcattacgcgcagtacagtcatggctcattattaggttttatcgcgtcatggtctaattgggtgtcgttagtcacgattatccccattgaggctgtcgccgctgttcaatacatgagttcgtggccctggtcttgggccaactggacgaaccgtttcatgcatcataatgagatttcaacccgcggtttgctagtcgtttttgcttttatcattgtctttacccttttaaatttctggtcagttaaattcttgacccgtttcaccagtttcatcgccatttttaaattggcaattccattgctgacgattatcatgttagtctcaactggctttcatgcggaaaacttcggccattcggtggcaacctttatgccatatggttctgctaaaatttttgcggcaacctcgatttccgggattatcttctcctacaatgcctttcaaacggtcattaatgttgggagtgaaattcgggattctaaacgcaatattggtcgcgggatcgcaatttcacttggtattagtattgtcatctatttattacttcaaatcacctttatcggtgcggtttctcccgctttaatcgctaaaaccggttggcatggcttgaatttccaatcaccatttgccgatttagcaattttattagggattcactggctcgctgtcctattatacttagatgctttcatctcgccatttgggaccggcgtttcatttgttgcatcctgtgcccgcacactggcggccttgaaacaaaacaaacatatgccaccgattgtcggtaagatgaaccaccaatataatatccccagagtcgccatggcgatcaacgccgtagtcagcatgttgttagtttccgtcttcagaagctggggcacgcttgccagcgttatttcgacggcgaccctgattgcctatttaactggtccggtaaccgtgatgtcacttcggaaaatggccccggatatgaatcgccccgtccattcaccatggatgaaagtgatggcgccgttatcctttgtcctcgctagtcttgcgacttactgggcaatgtggcccactacaatcaaggtcatcggcgtaattatgcttggcctaccattttatttctactatgaatatcgaattcattgggaaaatacctgggcccaattcaaaggcagtctctggttaattatttatttagccttgttatcattaatttccttcctcggtagccgtgagttcaatggtatcaacgtgattccttacccacttgatttcgtcttgattagcgccttagccctcatcttctattattggggtattatcagtcgcttctattcaaaatacttctcacgcgctaaacgcatcaatcaggacgtccaactttaaaagagtgtgccattagtcggcgttaaccgcaaggatatgactgatagaacacgtttaagctaaaagaatgtgtcatcattaaaaaagagattgaaaccaaaattatttttgtttcaatctctttttttgctatcatatcagcgtttctgttagaataagcgataaatggaggcgcttaaacatgaaaaaatttaccgtgcaatcaaccgaccgtcagcatcaactccacgtggttgcttggctaccaactcaaaaaccgattgcagttgtccaacttctaaccggtatggccgaatacatcgaacgctatgacgtactagcccaattcttagccgctcgcggcatcgtcgtgattggccacgatcatgtgggtcaaggacactccgttcagacgaccgatgaactcggctattttggcccccatggcttacagacactcttaaacgattgtactttaatcgggcgcatcgcccatgaagaataccccgaatgcccgctatttgtgttgggccattcgatggggtcaatgcttgccactcaatatgtcaaacaaacaactgtcccactggctggcgcaatttttatgggcgttattgacgtcccagtcgtgctcaagcctgttttaccactcgtcaatttaatcggggctcttgcgcctaaacaacccggtaagcttttgaataacctggctttcggggtttatcctaaacgctttgacgccaaacggccattctcgtggcttagttataaccaggacaatgtagcagcttacgaaaatcatcccctttgcggttatgtattcagcaatagtggctttgcgatgttgttgacactgacagaattaacgcgccacgctgattggcaactggcctcaaaagaacgcccagtactagtgctgagtggccaagacgatcctgcaggcggttatggccgccgcgcccgccatttagcgacacaatttaaaaagcacaccgtcactaacgccacggtgcgcattttgccacatacagcgcatgaaattttacaagaaacaaatgcaattgaacagcaacaagcgatttatgcttggttgcttacagcaatttctcaatctcctgcaacacgccataattctcgttagtatccgcgcggtaggtggcatattgcaacatatcatcatccgcattacccattaaataactgtatttaactgtttggagcatttctttatcattatacgtatccccaaaggccatcatttcagccgttgaaatattgaaatgattagctaaaaagcgcatcgcgtggcctttatcaatccctttgttcatgatatcgacccattccacaccagccacggccactgaatagtcagcgccaaatgttggcccgtaaatttgttcataaaaatcgcgactattggcttctgggaaataaaccgtaaatttatccgcttcaacactcacttgcgttaaatcgggaacgtatttgatttcggcatagaattgacggaatgtcgcatctaaagcttggtattgctcttcaatataaacggcatccattccacaaatcatcccgattccggtttggctctcgttcacaaaagcgaccatccgttgataatcagtcaatggcaataagctcttgaagataatctcaccttgataactgatgaccccgccattatcgcccacgaggcacatgtcattttctaacttagcaaacatctgcttcaacgtatagagtggccgaccactcgccgctgtgaaaatgatgcctttggccgttaattgtttaacaacttgttcaaaattcggtggcaactggccactttcgtttaataaggtatgatccatatctgatgcaattaatttaactgtcatgcttaacgctcccctatccttagttaccttaataatataacggtttcggtccgtcgtcgcaaccgtttacatctaactcattaaaaatagcactgacgcatttaacgcgtcagtgctattttcggttttatgctaattttaatcgttttaggcgtagtgcatttaataacactgacactgaactaaaactcatcgccgccccagcaatcattgggtttaaaagtggtcccccaaacaagtgcaggacccccattgcgactggaatcccgagaatattataggcaaaaggtagattgtaaaattaatccgaacgctgttcggacaaaaaagatcagcttcctttaaaatggtgtttaccacaaacccatcttttaggagctgatcttttgtctagtataacctattccgaacgaattaaaatcgaaaccttttgtgaattagggctgtccaatatccaaatgggcgttcggctgaaccgatcaccgtcaacaatttcttatgaattatctcgatgtcaaccttatcaggctgaattagcacaaacagatgccgaatacaagcgatcacgatgtggtcggaaaactaagctgagcgatgagttaaagcaaaaaattctcaaccatttacgtctaagctggtcaccaggaatgattgctcacgaatttaaactagctactaaatctatttataattggctaaatcaggggagaattggtttctccttgaatgatctacctgaacatggcgtacgccaacggcgtaacgttgaccaacgatccaaatataatcaatctttggggcgatcaattgaacagcgtcccatgatgattaatcaacgtaagcgcatcggcgattttgaactagatacagtcgttggtcctcgtgggcatagtaaggcagttttattaactttaatcgatcgcaaatcacggttcctttgggcataccggttaaaagatcggacgacagcgactgttaatgaagcactaactaagttcctaaccacttttaatggtccggtgcacagctttactgtggaccgtggcactgagtttagtgggctagtatcacttgaatcacaatatggtattaagacctattactgccatgcttatactccagctgaacgtggtagtaatgaacgctttaatcggaatttacgttatttttatcctaaagggactcgttttgagcacattagtgctcaagatttaacgacgacgttactccaaattaaccagcgaccacttaaaatactcgactggcaaacaccgtatcaggttatgctgacaaatttgtccaaaaattcggattaaatttgcaatctaccaaaagcccagaaaagattctctttgatattttgcatcgtttttcgacttaacttgaaagccgttggaaccgccattaaatcatcgtgcatcaacacaatatcggctgattcaatggccacatctgtccctgaaccaattgctaagccaacatcggcttgcgctaaagccggcgcatcattaatcccgtcaccaaccatcgccactaattggccggttgcttgtaaagttttaatttgcgctgccttttgttctggtaaaacatcactaatcacttgttcgattccaacttggtgtgcaattgcttgagccgtcttttggttatccccggtcaacatcacgacttgaatccccatcttttgcaggcgactgatggctgcttgactcgttgctttaaccggatcggccaccgcaattaccccttgtaattgaccgtcttgggccaagtacatcggtgtcttgccttgttcagctaattgttgcgccgtcttcaatccgacttcgatggcaacaccatttttagccattaattgttgatttccaaataaaatcgtctgatccgcaacttgggcggataggccgtaacccggaatggctgtgaaatcggtcattgctgataaggttaattggcgttcactggccgcttggctaattgcacttgctaacggatgttccgaaccagcttctacactagccgccaattgtaacaagtcatcttcagtgccctgataaacaaccatatcagtcacgattggttggccggcggtaatcgtccccgttttatccaatacaacggtttgaatatgttgcaccgtttcaagtgcgtcaccgctcttaatcaagacgccattttcagcccctttgcccgtccccaccataatggccgtgggggttgctagccctaaggcacatggacacgcaatcactaaaactgaaatcgtaatcgttaacgcaaagagccacgattcttgtcctaaaaagaaccacgctaaaccagataataaggccaaaccaatcacgattgggacaaaaacgcctgcaatcttatccgctaaccgtgcgatgggggccttagtcccttgcgcctgttcgactaattgaacaatttgcgccaaagccgtatctttaccaatcttagtcgctttaaactggaaatgaccattcttattcaagctcgccccaatgacagcatcgccaacttgtttttcaaccggtaaactttcaccggtaattagcgattcatcaactgccgaatggcccgcgattacttccccatcaaccggcactttttcgccaggacggaccacaagcacgtcgccgaccaccacttcagctacatcaatcgtcgtttcgacaccctcgcgtaaaaccgtcgcttgtttaggcgctaaattcaacaatttttcgattgctgatgaggtctgccccttagaacgcgcttcaaaatatttacccaacgtaatcaacgtcaaaataacactggctgattcataatagaggctcgtcactaaggcaacatgcccactgataatcgctaaagtggcgattaagctgtaaccccaagcagcactagtaccgagcgcaactaaggaatccatattgggatgcccattgaataacgccttaaacccgacaatgaaaaattgccggccccaatataataccggtaacgtcaatactagctgggtgaccgcaaagttaacgggcgcttgcatcggttgccaaaacgccggtagcggtaagccaaccatatgccccatcgataaatataaaagcggcaacgtcacaagggccgataaccaaaaacgccgccaaagtgcttgtaagtgagccgtgcgtttggcctggatcgcctgcgcttctttttccgggtcaatctgttctgttgcaccatagcccgctgcgctaaccgcttcttcaatcgtagtcacggataattcggaatcgtcatattcgacctgcattttttcggtggccaaattgaccgccgctttttgcatgcccggcaatttttgcgttgccccttcaatcgtttgtgcacaagaagcgcacaccatcccatcaatgttaaacgttttagttgtcatttgctggttgctcccttcaatccggtaattctagtcgaccgtgtagtgtgtcccttcaagtgccgctgccaaggtggcatgatcaatttcagtagccgtttgaagcgttgcttgtttttggtctaaactcacttcaaccgattgaacccctgcgatttttgagaagcgttcctgcacgttttgcgtacaaccatcacatttcatccctgtaattttaacgatttgtgtcattgttatatcctccaatatctacatttgtaaactgattgttcaaaaaaataaccgcctcagcgaaacgatcatttattcaataaagttagtttacaaccgtagacttaaaaagtcaacctaatcatcctaagcaataaaaaagactaaccgggttgctaaaaacaacttggtcagtctcttgtaagcatttcgtgatgcccgtggcaggattcgaacctgtactcggttacccaaacagcgacctgaacgctgcgcgtctgccagttccgccacacgggcgatttgctacatgactattgtaccagtgttgtgaagccctgccaatacccttttaacactatttcgcttataatagaggcaactaaaggaggtcatcgtatgcaaattatcacagacgagttggcccgccaagtgatcgtggctcggcccgctattagtcacaaaggcgattttgggcgtattttaattatcggcggtagtcagcaatatggcggtgcggctattatgagcgcctctgctgccgtttatgccggggcggggttagtttccgtggctagcgatttaagcattctcgctagcctgcacaccagcttacccgaagccatgtttattgattaccggcaacccttcgtccaatgggcacccactgttcaagccgccgatgttatcgtgattggtcctgggcttggcttaagtgcctttgcgttgcttcttttgaaacaggtcttgcaagctgctcagcctgaacaaaccctcttaatcgatggttctgcgcttaccttaatcgcccgcgaaaaactcgccctaccagatgcgcaactgattttaacgccccaccaaatggaatgggcgcgtctaagcggtctatcgattgcacaacaaactgtcgctaataatcaagcggcactggctgattatccaaaggccacgctcgtactaaaaaaacaccacaccgaaatttatcaccaaacacaagtcagtcaactcatgattggcggccccgcaatggcgaccggtggtagtggtgatactttaactgggattatcgctgctttttgtggtcaattcggcaccaactatcaaactattagcgcggcggtctatacgcacagcgccatttcagatcaactcgcccaaaagcaatacgtcactttacccactcaaatgattcaagctttaccacaattcatggcgcagatggctcatcaataaaaatagcagcccgcttttagcgaactgctatttttgtgttgctctttgtaaagcatcaatttcggttgttgttaacgcccggtattgtccacgttttaaatcagccggcaagcttaacggccccatcttaatccgttctagagtcagtacttctttgccaaccgcatgaaacatacgcttaacttgatggaacttaccttcatgaatttcaacttcgatcaaactttcttggcgcgctgtatcagtccttaaaatcgtcaattgtgctggttgggcatcaaaatcacgcaactttagaccagccgcaaattgtgcttggtcagccgctgttaccaccccggcaattttagcgcggtacgttttggccacgtgttttttgggactcaataaatcgtgggctaagtcgccatcattggtgatcagcaatagccccgtcgtatccttgtccaaacgacccactgggaataagtcttcccgataatctgctggtgcgaataaatccatgactgttttttgcggatcagttgtggccgaaatcacacccgccggtttatttaataaccaataaaaattagtttgatagcgaatcggttcatcatcaacgtaaaccaccgtttctggggtcacttgatatttcgcttctttgataactttatcggcaacacgaacccgccctgcctttagtaatggcttgagcgttttacgtgtgccgacattcatatgacttaaaaaacgatcaattctcattttaatttcaactttcttctaaagcggtctaagttactgcctaggacataatcggctaagcgtgatttcaacgctaaaacagcatagactaacccaccaactgcgacactaatcgcaaggacaagcacactttgaagccgactttgtggattaaacactaacaataatcctttgaccgttagtgatgtcatcagatacataatcaccgaaaagccgacgatcccgattaaacggcgaatcgtttgccaggcatcaaaatgataatagcggtgtaatgcggctaacatcaagattgaactcgtcgcaaaggctaagccagttgacacaagcgggccgtatacccggaagaaataaatagctgggtattgggccacaattttaacgatgaaaccaatcaatagatagaacaaggccaaccggttttggtataacccttgtagaatcgctcctaagaccgtgaagaggcctaagagaatcgaaatatacgatgaaaattgcaagacgctaatccctaaggcatcgtgtgagtagaacaacgtataaagtggttcggccacggctgccatcccgaaagccgctggaatcatgactaaattaaagagttgaatggtactaccaatttgctggcgtaattctttttgattaccacgaacgtgagccgcagacatcaatggtaccgccgtaacagccattgcggccgctaatgaaaccgtgattgaaatcagcttattcgcattaaccgcaaaaagcgtatatagattccaaagttggtgatccgaagcaattacaaaatcactcatcatacgattaaaactatactggtcaataatatagactaaattaatactagcatcaataacgataaaaggaatcgattgcttgataatccccttcaataaatcattcgttgaaacagttatcgcattattactaccagcaattagcttttcaatccgtggtcgctgctttaagtagtgccaaatcagtagaagtagaccagcaaccgctccgataaatgccgcaaaagttgcctgagtcacagcatcaatgtaacttcctcttaagacctgtgtgataacaaaaacagtcacagtcatataaattacccgagcaacttgttcaataaattgagaaatcgcggaaggtgccatctcagcatacccttggaaaaaaccacgcataatacttaagagtggaatcaccaacaatggccaacaaagtgaatggaacaccggaatcattctggcatccccttgggataataccggtgctagaagatataacgcacctgccgataaaatccccataatcagcattaaaattagtgatttttgaaagagtttctgcccaactccatattcattcatttcgttatagtgcgcaatttgttttgagagtgcccccggaatcccagcagttgagacaacgattagcacactataaatttggtatcctcggccaaataaattattggctgctaaaaagttaaccccaaaccagattggccatggaataacatagatggctcccagaattcgcgagaaaatacttccggcagtcatccaagcggatccccgcaacatcttgctctgtgaagatttatccgtcgcctttgtatcagatgaattggtcattttccataactcccttattaaacgtcaaaaaagcatcttcctaccattttagttgattgcctgaaaccttgcaattcctttaacaaaactttatgaaaaaagagtgctttagtacacgtttaacttctgaggattagcctaatcaggcgaattgacgatgcaatcgtcgatttgactgatgtcgctaaccggaagaagttgcgtactaaagcacgtttcaaacgtggagtgcttctgatgacggttaacaactgagcattaatggttattttagattaagcggaagttgttgtcatcagaagcacgtttcaaattagagtgctttaccgagcgtttaacttctgagtatagcatagcttggtgaatgagccgcacagcggatcgtttgctaagcgtcgctagacggaagaaggtgctcgttaaagcacgtttcagccgattattttgtgaagtttaggcaaaaaaatcacaataaaaaaacaggatccgcttccgcagaccccgtttcatttttatttcgttttcgttgtttgtttaatcaagtaccatgttaataagatactgatgaacaccatgatgctcccgaaaattggtgtactacccaagccccaagcggcagaagcttgaccgccgaccaatgagccaatcgtaatcccaatgttaaaggctgagatattcaaagccgatgccaatggaatatcgtttggtgtgaacttttcagcaagttggacaatgtaaagttgcaaaccaggaacgtccatgaaggcgaaaaagcccatcaataagacgttaattaaaccaaaccaatgtgaattcaatgttagcatgaataacatgagggttactaataacccaacaaacattctcaataatgccaacaaaggtttgtggttagaccacttaccgcctaacgtgttccctacagcaaccattaagccataaacaactaagataataaccaccgcacttggtgaccaacccatcttcgtttgtaagattggtgtcacaaaagtataaactgtgaatgtgccaccataaccgagggctgtaattaataaggcaatcacgattgctttatttttgaagacccgaataatcccactaaattggcttggttgacccaacggtaagtcgtttggaaccaagaaccagttagcgattaagcccaagacaccaatgccagcgatgaaaataaatgacatgtgccaggttgaaatttgaccgatgaaagtccccagcggtaccccggtaacagttgcgactgttaaaccagtgaacatcacggcaatcgcacttgctcggcgttctggttccacaacatccgccgcaatcactgatgcgattgacataaagatcccgtgtgataacgctgaaataatccgaccgattaaaacaactgagaagactggggcaaaggccaccgttaagttaccaatggtaaagacgatcataatccccaacaataaattcttccgtggccaacgactggttaagatagccaaaatgggcgcaccaatcgtaatccccaaggcgtacattgaaacggttaagccggcttggctcattgtaatcccaaaatctttaatcatcaacggcattaagccaacactgatgaattctgttgaaccaatcgcaaaggcactaatcgccaatgctaacaaagttaagttcgcacgttgctttttactcattttcccacactcctaatagacttttttactgatgtactatattattcaatagaagcgtcattttcacaatcacgcactttttagtcagtaggttactgaaaagtaataattgagtcttatcacaatgaaaaggtgaatcaaaattagaaatgaatgagaaaacttataacattggtgttgaagccacgatggaaatcatcggtggtaaatggaaacctgtcattttatgccacttacggaatcaaccactccgctcaagtgaactcttacaaaatatccctaaaatctctcaaaaagttttaacgcaacaattgcgcgaactcgaagccgacgggattatcaatcggaaaatctatcaagaaattccgccgcgggttgaatacagcctctctgaatacggtcaatcactcaataagattttgaacctactctgcttatggggtgaagataatatcgaccgccgccaatcagctggggaatcgatcaatgtcttgcatcgtgatcaaattaatccaatctactaaaaaagagtgctgtaggttgcgggtagcaactgagcattaatacaaaattggcagtaatccaaggttttaggattactgccaattttagattaagcggaagttgttgcaaccaaaaagcacgtctagacgataggagtctggatagcaaaaaaggcgccaggacaagtaatgcttgtcttggcgccttcttcactatttgaatattgataatctaaccgtgttctataagtcatatcctgaacttatggcacactcttctattctttttgacgtccaaacttcacgaaataaataacaatcatcaggactaaaaagattaagccgacaattaatgagatccgtgtttctgggttaataaacatgaatactagtgttaagcacaacattgccaacgtgatgtagttggaatatggtgaccatggcattttaaatggatgggttgccatcttttcagcgtgttgtttcctaaaggcgatttggctaattaagatgacaaaccaaggcaccattcctggcaagacacttgaactataaacaaggacgaagatgttgccggctttaggataaaccaatggtagaatcgcgtttaaaatcacaccgattaaaatccctaatgaaatcgcaccaaccgcgtagaatggcacgccatgtcggttgagtttcaagaaacgttttggtaattgaccattattagccaacgtaaacgtcatccggctcgcactgtaaatcccagagttagcgcctgataaggccgctgtaatcacaacgaaattaataattgaggctgcggcggtaatcccgattttagcgaaggtttgaacaaatggtgaaccaacttggttgagttcattccaagggtaaatacttaaaatgacgaaaatagcaccgatgtagaaaatgaggatccgagcaacagttgattgaatcgctttaactaaggtttcttgtgggttttcggcttctccggccgtaatcccaattaattcaatcccttgataagaagcaaggacaatcgcaagggcaaagacaaagcctttgaatccacctgtgaagaaaccgtgtgcccataaattgctaatcccaactgggtgcatgtgattcccaatcccgaagatgattaatccgagaccagcgacaatcattaacacaatcgtcaccactttaattagggcaaaccagaattctagttcaccaaacatgctgaccgatatgagattagcggcacataagaacgtaattgcgactaaacctgggacccaccctggcagattcggccaccaaaattctagatagccaccgattgcaatcatttcactcatcccaacgaccacaaattggaaaacattactccaagctgtcaaataaccaaaaatggggtgcatatattccgttgcaaatttcgcaaacgatcccgtatctggatcaacgtacaacatttcccccaaagcgcgcatgattaaatacaataatagaccggcaataccataagcgattaagacagaaggtcctgtccatttaatcgtcgtattagcccccataaacaaaccgaccccgattgtcccacctaatgcaatcatctgcatctgacgggcatttaaattccgtttcattctcctcaaacccttctatttaggtatccccattgttggttaacccgacaatctaaatttacttatcatcgtataataaaaaaagaggaaaatcaatatcttttctaatctttttatcattttagaatgctattaaataaggttttgtaggtcaatagtatttgttaggttcctaactattaactttagataagaaaaaaggacagacaaaattgaatttgtctgtcctttttgaaacgtgctttttcaggtatatcattgtggttagctacgtcccgcaaataatcgactttgtcgattatccacgagcctaggctaatcttcacgatataaccacctgaaacacactcttttttgaaacgtgctttttggttgcaacaacttccgcttaatctaaaactgtaaataatcctaaaacctggattatttacaattttttattaatgctcagttgctgaccgcaaccaaatgcactcttgtctgaaacgtgcttttcaagctaactttctgcgcttatcccagtgaatcaaacaaccgactgcgtcgcttattcgcttccctctgataatgctcaaaagttgcccgagcttgaacgcactctaattcgctacaatgtttaccaatttgtttggaatggcaatcactttacggactgtcttgtctgcgataaattcggctactttttcgttggcctttgccatcgcttctaattcttccttcggtgtatctttcgccactgttactttggcctttaacttaccgttaacttggaagataacttctacttcattagcgattaatgctgctgggtcaaatgttggccaatcaacatagctgattgaatcatcatgaccaagcattgcccataattcttccatcatatgtggtgcgattggggctaataatttcacgaagccttcagcatattcacgtgggaatgtatctgctttataagcatcgttgatgaagaccatcaattgtgaaatggccacgttaaagtgcatgctttcgaagtcttctgtcactttcttaacagtttcgttataaaccttcttcaattgatcgttgttgtcagcgacaatcttgcttgaaagttggtcgttttcgtccgtatcttcttctgtgtataaacgccatacacggtccaagaatttacgagcgccggctaagcccttttcactccatgaaattgaagcatctaatgggcccatgaacatttcgtatagacgtaatgtatcagcaccaaaacgatcaacaacatcatcagggttaacaacgttcccttttgatttagacattttttcgtggttatcgcctaaaatcatcccttgattgtataggtgttggaatggttccttcgttgggacgacaccgatatcatacaagaatttgtgccagaaacgaacatatagtaaatgaagcacagcatgttctgcaccaccgatgtacatgtcaactggtaaccagtccttcaacttgtcaaaatcagccaatttatcagggttcttaggatcgatataacggaggtaataccatgaactaccagcccattgtggcattgtattcgtttcacgacggcctttacgaccattttcgtccgtcacgtttaaccagtctgttaagttcgcaagtggactttcaccagtaccagaaggtttgatatcgcttgttaatggtaattcaagtggcaattgatcttctggaacgacagatgttgtgccatcttcccaatgaataattggaattggttcaccccagtagcgttgacgtgagaataaccagtcacgtaatttataactgatttgttcatgacccactttgtgttcaaccaaccatggaatcatcttgtcgatagcagcttgtttgtctaagccatctaagaaatctgaattgatcatcacaccaggttctgtgtgaacagcttcttcagggttaccgcctgaaacaactggtttcaatggtaaaccgaatttcttggcaaattcccaatcgcgagggtcatgtgcaggaacggccatgacagcaccagtcccgtatgaagctaaaacgtaatctgaaatccagattggtaaacgttcgccgttcactggattgatggcataagcacccgtaaaggcacctgttttgtccttagccaaatcagtccgttcaagatcactcttgtgttcgatttcttttaagtatgcatcaacggcagctttttgttcaggcgttgtgatgtcagctactaatttgtgttctggcgccatcacgatgtaactcacaccaaacattgtgtcggcacgtgttgtgaagacgtcaatattagcgtcatggttttcaacagcaaatgaaacttcagcgccttttgagcggccaatccagttacgttgcatatccttgacactttcaggccaatcaacaaggtctaagtcgtcaattaaacgatcagcataagccgtaatcttcaacatccattgacgcattggtttccggtaaacaggataaccaccacgttcagttttaccgtcgatcacttcttcgttggccacaactgtccctaaatctgggctccagttaacagcaacttcggcttcataagccaagcctttttcgtacattttttcaaaaatccattgggtccatttgtagaaatcaggatccgttgtattcacttcgcgatcccaatcgtatgagaagcctaatgaattgatttgacgtttgaaagtgttgatatttttttgcgtgaaatcagcagggttattccccgtatctaacgcatattgttcagcaggtaagccgaatgcatcccaacccattgggtgcaacacgttgaagccttgcatccgtttcatccgggccaagatatcagttgccgtatagccttcaggatggccaacgtgcaacccttgtcctgatggatatgggaacatatctaatgcgtagaaatttttcttatctttatcttctgttgttttaaaagatttatgtgattgccagtaggcttgccacttttgttcaactgcgcgatgatcgtaagtcatatcaaacactccttatttttagcgtactttcaaaagtatagacacttttgacgcactcttttttaatccacttaacgtcaaaaaaagtcctatggtataaataccataggacgaattgaccgcgatgccacctaagttctgcccagttcaaactgagcaactctctggccgtaacgtggctgacgtttctatctacttgatttcaatagaaaactcaaaggtgagttcgctaagttcaacgacgtgttcgcactaaccacacgctctctggacgtttcacttaactactaatccctctcaacgttaaataattgttcttagcataccaaactcttacttcaatttcaagacttggccaactaagattaaatctgagcgtaaattattggcagtcttcaattggctaattgtcgtaccatttttttgagcgattgaccataggctatcacctgatttaacggtataagactttgttttattaggcgttgtttggttgttattgttagttgttgttttaccagcactgacttttaacacttgacctggataaataaaattatttttaatgttatttaaacgaaccaattcagccattgagattcctgattgttgtgaaatccgccatactgaatcaccagctttgaccttgtaggttttagcggttgtcgttgttgagccattgttattattactactgctattgttgttgttatttgttggcggtgttgtttgtcccgttgatttttgaccaacaattaatttttgaccaggatagatgaagttattacggatattattccacttcactaagttcgccattgaaacaccatagcggtttgagattgcccaaactgaatcgccagacttaaccgtgtaagtttggttattcgccggtgttgttgggttcgttggatttgtcggtttagttggattcgttggtgttgttgggtttgttgtttgtttagcagaaacaatcaaaacatcgcccgggtggatcatgttatttttaatgttattccagctaattaacgtattcattgaaataccgtaacgcttagcaatgccgtaaactgaatcgccggctttaactgtgtatttttcaccatttgttggtttagttggattggttgggttcgttggtgtcgtcggattcgttggtgttgttggtttgttagccgaaacgattaagacatcaccaggatgaatcatgttatttttaatgttattccagctaattaaagtactcattgaaatcccataacgtttagcgatgccgtaaactgaatcgccagctttaaccgtatacttttcaccattcgttggtgttgttgggttcgttggtgttgtgcccgtaccaccattgttaccacttgtagcaggtgtatcatattgcgttaagttatattgttggataaggcgatttaaactagccgcatagttcgtagctgtggcatagcgaccttgaagatattgtgtcgcattttgatagcttgtcgtgtggctcttgaaggccccttggtaataaggtgttgacccaaaagaagtattcttcaaaacatgcacgtaatcttgtagtgattggtaatatgaaggatatttacggaaagcagcgttgatttgataaagattaccatgaccatcatcttcgtttgttaacatgtagacagagctaccgttgtaactccctttaacaccgaataagttgtagttaggggctttgcctaaagcgctattcccaaaacctgattcaagagaagcttgggcaatcattactgaagcatacaaatcattttcacttgctaattgacgtgctgagctagcaattgaattgatgaaagttgatgcactggttgatgaataagccataatcgcttgagctgttgcgatattagcacccgtattttgtgtgccaacaactggttgtgcttgtgttggtttgggttgagctgtagctgccttattcgcatcattttcagtcacttgaggcttcacaactggttgtgattggctttggctactacttgttgtttggcttgattgactttgactgctgcttgttgcttggtcagtactacttgttgaggtcgtactattagcaacactacttgtacttgatgtcgctgtattgaggttggtttcgttggcgctcactgtttcaacagctgccttaactttaccgctcgtgagactaggtgcaaccgcagaccccatcaagaaactagctcctgcaaaagtcgtcatatgccgcactttcttattccgtagttcctttttttgacggtttaaaattattttttgtgtcgcgattctttgttttctagtctctttcaacataaaaacctccatataaattttctttaaagtaatagctatctttattaagtttatctaaaatatattataatattaataatcctataaaacaacgtatatgttataagcggttaataatcgatttaaaattagttcaaggcgacagaccgttaacattgttattatagaatttgaaaggggttcactatgtctcgtcaaaagcaacaactcacatcaatgatagtgggcttttcactatttatgattattttagtcagtcttttaaaccaagcaacttggattaatactttcgatagtcacatcattcatatcgttcgtagcgttgcttcacctttaacaaccactatagcaatcgctatcacaagcataggtaatccttatagtatgctgggattaacagtcgtagcaacgctcaccttactcttcatccgccagaataatgctgcgctcttcttattagtcaatatggcggttttcagtagtttaaaccacattattaaagaatgggttgctcgaccccgacctagcgcgcatcatttggtactcgctagcggctttagttttcctagtggtcattcttctggtgccctattattttttggctcattaagcattattgccatttacctgattaaaagtcactattggcggcacctagtaattggtttgtgcttaatactgacgctcctcattgagattagccggatttacgtgcaggttcactaccccacagatgttttagccggtttcatgcttgccctaaccggattaggcctttcgtggtattattttgatagctaccatctattgcagcgaaaatcgtaattaaaggggatttttatcatgctacttgatcagccaagttcttttgcccattttctattggaccaagccgttcgaccaggcgatgttgtgattgacgccaccgtaggtcatggtgatgacactttatttttagcagaaaaggttgccgattacggccatgtttatggcttcgatattcaaaaagaagcgttggcaacttgtcaaaaacggttaacaacggccaatcttaaccagcaggtatccctcatcaatcaaggccacgagcgaatcattactgctcttcccgccgatttaaaggtgcaggcggcgatcttcagtcttggctcactttcaccagagacttctcaagatgtcacgctccctaacacgaccatctcggcttaccatcaagtcttatcccgtctcaatcggggcggtttattactttttatcattgataatcacttttttaaatcggaagaagaaatccactacttagttgcagatttaacccgcctcaatcctgagcgttatgcagttcgccactttcaaggcgtcaaccaagatgtcggtcaactactgaccgtgatcaaaaaataaaaaggtttccggataaaagttatttttatccggaaaccttttttgattactcaatttttggattaaccaacgattttagtgccatgtgcttctgtcacgtttaatcgttcagtaataccagcaacgttttccgctgtaatgccaccgcctggtaaaatgcctaagcgaccgtcagctaaacgcactagttcttgaagacgttcttcatttaacggtgccgttaatgggccaccatgcgttaaaatccgtttaacatcatgttcaaccaaccagtcgattgcttcggcttggtcagctactgctaattcgtcaaaagccatgtgaaaaacaacttgcatcccattggcagcgccaattagcatttccattgcttcatcatcaatcttattgtcaggtgttaagcaacccacaacaatcccgtcagcgcctaattcttgtgctgaaaaaatatcagcttccataatttttaattcttgatcgttatagacaaagttaccaccacgggggcgaatcatgaccatcactggcacatcatgttcatgtgcataacgtactgattcagccataacaccacgactaacagtggtgccgccaaccgctaagttgtcgtttaattcaattcgtttggcaccattacgaatggcagccggaatttcggtgaaattttcgacacaaacttctttgattaacatgggaaaacctccaatttttattttaaacgtgctttttgggtcgcaacaacttccgctcaatctaaaatttctattaatcctaaaatctggattaatagaaatttttaattaatgctcagttgctaagcgcacccaaaagcactcatatccaaacctgcttttaattagcaactttctgtgcctagttctatccgtcaaatcaccgacgctgtcggtaattcgccagattgactagtgctcaaaagttaaccgccaattaacgcactcttttttaaacgtgctttttgaaacatattcctgcgcttaacgctatttgccaaactagcgattccatcgctaattcgtcaaatcaggttaatgctctgaatatacccgtttcaaacgcactcttataagaacattgcgcctaataccaatacccctaggataatccggtaccaaccgaaaaccttgaaatcgtttttcttgatgtaacccatcaagaacttgattgaaatgattgaaatgatgagtgagacgaccatcccgaccaataaaataattgattgatcaccagtaaaggtattgccttggtagaagaacttcccaatcttcaagatgctgaccccaatcatcgttggaattgccatgaagaatgagaattcagccccaacaaaacgtgatgtcccaattaaaatcgcccctaaaatcgttgcgcctgaacgtgatgtcccaggaataattgataaggcttggaaacacccaatccaaaaggcggttaaccaaggcaacgtatttaaatctgcaaatttgggtgtgcgttgtttattgcgattttcaataacgataaataaaataccatataaaattaacatacttgcgacaacccagttttgcattaaatgttcgtccatccaatcattcaatgggaaaccaataatcactgacggaataaccgccaaaataaccttaaaccataaagtccatgtttgcttttgctctaattgattcttctgcggtgaaaatgggttcaatttatggaagtataagacgacaacggccaaaatcgcaccgaattgaatgacgtaattaaacatatccataaaggcttttgattcgcccatttttaaaacactacctactaagactaaatggcccgttgaactaatcggtaaccattccgtaaaaccttcgacaatccctaaaataattgccttaatcacatttaaagttaacacaatctccatccctccatgaaacgtagtcgttctctagtatactaatttcaaatctagaatgcgacttaaattagaagtttaaggtttttttattaaaattaaacacaaaaaaagaccgccaaatcacggccttttgcttatttttagagtgttgtttcatcaaaatcaaactggcgttgcgctaaaacggcgctaaaatcagctggcaccgggcttttcaccgtaattgttcgttcttcaaatggatgatagaacgtcaattggcggcaatgaagtgcttggcgcggcaatagatcatcagattcaccgtagaggttatcaccaattagcgaatgccctaacgatgcaaaatggacccgaatctgatgtgtccggcctgttagtaacttcaatttaacgagtgtggcgccatcaccgtgagcggcttgccaatattcggtcaatgaccgcttaccaccttcgccgaccacccgtcgcatgtagaattcttccgagcgtttaatcggacgatcaatccacgcatgttgcggtaaatcctcgcgcatatcaccactagcaattgcgatatacgttttttgtaattctttcgactgtaactgtcgatccaacaaactatgcgcaaaaccatgcttagtgaacatcatcaagccgctcgtatcacggtccaaacgcgtgacgacatgaactgcaagactttcagcttgttcatcaattaaatactgcttcacaaagttagccatcgtgttattcggatggttgggtgccggcagcgaagccacaaaggctggtttatcaacaatcagaaaatgatcatcctcataggcaatttttaaatcacccttcacaggaatcacgtgttccaccgctacttctggcgctagataaaccgtcaccacatcattttgaactaatctaatattggtatgggcttcctgaccgttcactaaaatctgcccacctgagaatttaatcttcgatagctgactccgagaaatctcatgtcgtcttaaaaaattgcgtaaaatacagccttcgctgtctgtgtattgccactcaaatttcatgttttgacccaataaatgcatcttcaacgcgatcccagaaatgggtgtgtcggtaacgtgcaaattgtattctttcttttgcaattttaaattgcattgattcaattggtcgatccttaaacgtaaactgatcaatcgtcacaacgtaatcgctggtgcgtgagggttttaatagtaaccactcatcagaaggcaacacaattggtgcggccagtgtccggtaaacccgattattaatcgacgcaatttcggtcaattgcatcgcttctaagcgtggatgtaagactgcaccaccaattgatttcccataggccgttgagccggttggtgtcgaaacacatagcccatcgccacggaagctttcaaaaaagttctctttgatataaacatcagtccgcaaggttgccgcgtaacgccgcaacgtcacttcattcaatgccaagaagtgttggacttcattggtatcagcataggtaatcttaacttcgagtaacggataactaatactctgacccaaatcttcttgtaaagcgaccactaaatcatcaacttcaaaatcccgccaatccgtataaaaacccaggtgccctgtatggaccccgataaagcggatttgatctagcgcatcggcatagcggtgaaaagcagacaataacgtcccatcaccacccactgaaatcaccacttctggtgtttgcgcgtccatcgtaaaaccgttgttaattaacttattggtcagtttatcagccacttgtcgagaagagctgccgtcattgctatataccgttattctcaatctggggcatctccttcagaatcattttcagtcgccttttctaaagcactctgccacttgccatatgaaaagagttgttgtgcttcttgaatttcttcgcgaatttcagacatttctttatctaacataaatgacgcttcggctgcccgttttaaacgtgctttcaaggtttcagggaattccccttggtatttataattgagtgaatgttcaatcgtcgcccagaaattcatcgacattgtccgaatctgaatttctgccaaaatcaatttttcaccactaatcaattgcacggggtattccaccacaatgtgatatgaacgataaccactaggtttaacgtttgaaacgtagtcgcgttcctcgataatcttcatatcggttcgttggtgtaatagacccacaatttcgtggatatcctcgacgaactgacacataatccgtaatccagcaatatcttgcatatcttgttccaataaatcttctgtgatataccgccgttgcattttctccttgatactatcaatcggtttgacccggcccgttacaaattcgattggggcatgttcattattttgttgatattgtttacgcataccacgtaattttattttcaattcactaacggcttgttcataaggcatcaggaattttttccaattttcgaccataataacccctcattcaatctgtcacatacagcattattctaacatatattggaaaagaatagatagcattcctcccaaatcaaatacaattacaagttttcaaatttatgctaggatagtcttattctcaaaaggcaggttattaaatgactcagaccattgaacgtgaatttaaagtcagtctcactgaacaacaatttaaacaactgcaagccgcttatccatggccgacaccttttacccagactaattattactacgaactaccacaaaatgagttacaacgccgacatatggggttacgaactcgtctttaccaagatcatgcagaacagacactgaaggtcccccaagctggtgcgactcgtaccctattggagatcaccgatacaatgccattagccaccgcacagcaattgattgcgcaacaaaccattcagcccaatcagcaaattgccaagtatctagaaacaatcgggattgattggtcgccccttttcatctggggtcaagcaaccactaagcgtcgggttttaacactgcctagttgtcgcctgacattagatcaaacaacctatccggatcagacggctgactatgaattggaactggaatttgacgacatgatactcgcccaacctttctttcaagacatcgttgcgcgtttcaaattaacacaaactgcaccactcaacaagattcaacgtgctaaaaatcatcaaagctaactaattgcaaatccaaaaaaatttgttaaagtaagacaagagctttcaatacgagacttaagtttgggggaaccattttgttagaagtgtttttatatattaacccgatcggccaacgttgcttgcaatccgaaaaggcacttttaaaaattattgacgaggctgatatgaacatccatttcaagttcatacccgtcctcaacttacaaaacgttgaacgttacatgcaatttcaaaatttaaaccgacgtgacttagacttaagaaaccacgtcttcagtacgatgtacgaagcagtcttagcttataaagcagcgactttccaaggaagtaagaagagccaagcatttttaatgcagctccaacaagtttttcaacaacctgatactacccttgatactaaattagttttagaaatcgctgaaaaggcccacttagatactgaaatgttactcgaagattggcacagcgatttaactaaacaggtttttgattccgatcaacaactagcctgtgaaatgaacattaagatgacaccttccgcagttgcctttgactattctaaagatgactctgaagccggattattaattgaaaattgtgattcttacgacctcttgaaagaggtttgttctcagggagtgagtcctgaagacacgtaccaaaaattacaaaaacataaagctaatgtgactaaaatcgcctttcgcgtactgtcgtaatccgtcattcagcactaaataagcgctcaagattttaaacagtcttggacgcttattttttagcccgcaaagcctgttgtagcctgcaggttggccaatctcgaaaagcttgttggccaattaacggttgatttaaggtgggacaaaactgcgaaaatgtggttacgggttgctcagccagccaccactttaagcgactttcaaactgattctgctgataaagtggtggcactaccgattgataaaaacaccaatcaggggctttttggagtagcgttccttgttggtaacaaaactgttgcaagcggacaaaacgctcatcacgtagctttagtcgttgcatcagccgcgctcgttgccaatcaattggcatattttgaatattgattggttttaacaaacgatttttacttaaaaatgcgactagttgatgcggtttaaagtattgtgtccgccactgataaccttgaaattcaagcgcaacgacgtgatgttgcaagacccaacggtgcaattgcgtgctgtaacaaactagataaaagccccattccgggcaataatttaaaaaagccaattgttgccgactaagatggcgggatttaaaacggaaccgatcaccaactatccaagtgaccgccaaaccacttgcatgatacccctgtgttcgttttaacaattgtgtgggtgtcaacggactacattgatactcaatcacttgtgactcacaattgggctttgttaaataaacatcggccctctgctcaggattaacaaccaactcaaaatctgcctgccaccccagcgcattagcaagtgctgcaatcgccaccttaccagtttgatgggcgtcactttcaccgccaccacccaccactttagtttgatgcgcaaaataaggaacagtctgctgaccgcctttgagttgaacaggcttttggcaccgcgggcaaaaatactgaccacttccgagtaagacggcatctccagcagacaccaactgaccagcaagattcaaagccattttcatcaaaacaccccaagaaaaaatacgcaaaaaagccagttgattattcatcaactggctttttaattaatctttaaaatagtaacgtgttaattccaaggcgctattttccattactctctgaccatattcacttaagaaatcagcggtgtaatttgttttatgaccaaattcattagcgaccgctaaatcatcttggacaaacgtttccgttgtattttctaagaagaacactagttgcgcgtaatattgatgtttgtaaacaaaaaggttcgaaacaccactttcaatgtgcaactgttgggcaagtgcaatccaatcttcaaatgtatcaaagcctaaaacaacttgtttagttgggttatccgcttgatttaaataagattcgatttcgtcgtcttcttcgtcatcctcagaagaggccgtatcccgcttcaatagttgatccttaatatactctgtaataccgtcttttccctgaaccatttctgattgtgctttgttcaaatcaagattagataaattcttactaattaataactctaacccctgttcattaggtaatacttggaaagtgaccgcatcattattagcgaaaacgtgatcttgatcaacttcttctagaattgaatagaagaagcgctcgatttttttatgattactcaataaatcaaggccagtaatgccacgttcttctagatcatcattttccaataaaacacgaattgtgttttcatcgattttttccattctcatgggacaacgcccctttctattgggctatttaaatagcctgcacagtatcctactctttgctttaccataccagtatcggacacaacattcaagtatcaaaccatttccattcaaaaaaagataaggatttcgtttgctactaaaaaagtcgaggtatccacctcgactttttttagaatcctgccattaattgtgcttgttgtaattctagtgcgcgcacttcgcgtggtaagaaacgacgaatttcatcttcgttgtaaccaacttgaagtcgtttttcatccaagatgattggtcgtcttaatagacctggattttcttgaacaagatctaataattcattaacagataaatcatcaattttaatatttagttgttggaaaatcttagaacgtgttgaaataatttcttcagtgccgtcctcagtcattcgcaaaatggttttaatttcatttttattgagaggctccgaaaaaatattgcgttctttaaatggaatgttatgttcctttaaccacgcacgagctttacgacaagatgtacaacttggtgaagtatataatgtaaccatatgtctctctcctttaccttttatgagagcggctatgaaataacccatctccgtctcattctctctcttacaagaacttattatacgcgaaacaaccagcaaaaactagttaatttccttaatttctaattaaatattaatcttctctattagactaatagtactataatgttcaataaaagcgtttcaatccactcatatcacacttttaacttattgtccattttaaaaatttatccttaccatttaaaaaaaattataccagcgtatcgttctcatgatatttaacttattttttgtaagctaacaacaagacctattctaacctagtctattttaattgtcaaaccctgttcggcaattgtgactggaattgtcgttatcactgttttagcttgtgccaataaaatctttggtgtgacagcttgtggtaaatgcgttagcaataattgtttaacgccgctaatctgtgcaaggttcgctgattgcgtcgtcgtcatgtgcgccattttccctgtgcgatcagctaagaagttagtgtcagtcatcaataaatcagcaccctgacagaactcagctaaccctgggaagtaggccgtatccgctgtgaagactaaaaccttgcctgttgtttcttcttcaattcgaacggcaaaggctggcactggatgttcagtccgcttaaacgtgactttcaatggtccgagttgcaacgtagtatcttcttgataaccaaatccttgcgttacatttggtaaggttagactaccaaagtgcaatggatcttgtaaatgcccatagattggcaagatgggttctttcttttgacctgcttgtagttgccagtaatattgtaaaacgccgacatctgcgatgtgatcgtggtgataatgcgtcaacaagacggcatctaattggagtggatcaagttctttttcgagtgccaagagtgcaccgctcccgcaatcgagtaataaatgataatcgccactcgttaagagataactacttgtgccgacccccgcatatggataaccgccataataacctaaaactgttaattccattttaatgaaccacctttctatcttcctctatagtagctcactagccaattatattgcacccttgtttttaaatatttagcgttttttaagcatcaaaaaaggattggcatgttagccaatccttctttactattgaataatttgaatgcgttgttgcttaatatcttgataaaaggccgtcacactgacgattaaatatggatagaaccagatgaaaccgatgccagccgtcaagtagactaacaattcccagccaatgaatgataaccctaatcctaataatttcaaccagtgcccttttaagatgagtactgacaaggatagtagcatccgcattgaaacctgtggaaaatcaaatttgatcaacactaagatttgatagtacatcaaaattaatggttgcaagaaggtgattgctagaatcaccaacaagaatgccaaaacagtcgtatattgttttggattctgactaatctgcataatataaggtgccattgatgtgatgccattatacgtataacggaaaacccgttgccagctgattaactggtgaaatggtgctaaaccaataaatgttaatgcccaatttaataattgttgaatgaagtttaagataatcagatgcgtataaaacggtggtcggaacaatactaatgtatcgctgagacgcgtttcttttttgattgttaatttatacgccgctaagaaaacagcgtttaaaaagacaaaataaaataaatagttggcaaacgtatttaacatttgataaccaaatgaatttgtctcgaataagctttgcaacagcgtatcggtccccatttcgactaatagccagataatcactaaggttgccatcatctgccagtggccttttaatagttgccgcgcagttgcacgataagttcttaattgcaaaaaattttcctccgagcttaatatagtgcatcgtcatttaacggtatattgacgatgcgattgtagatttcggcagttaccagatagaacacaaaataaatcataatgaaaatgccgcacacaatatagactaattgtaacccaggattatccaaaaacaaactcaataatcgaatcgcaaaaatcgcgtgcaaggtccccagaataatcggcaataaaaagataatcagaatttggaaataaatcgtgcgtttgatttccgaataagtcatgccaattcgttttaaggttttatactgcaaaatttcttcttgggcttctgataattgtttcagcatgatgatgctcccagttgccagcatgaacgtcaatgcgataaataaggcaatatacatataaaaaccaaagttggcattcgcacggtcctgattaggcttgcgtaataataaatcagcacggacaaaaccacttcgttcttctttagtcgtcactcgatagcgtttaaagccattttcatttctaacagctgttagatagctccgttttttcgtatcttgtgaaagcttaaaaaacgacttcatcagttttttatcgcgtcgttgcttaggcgttagatcaagcgcatagacatggtcaatagtagccggcttgatttgatcgtaatattgatctggcacagcaaccatattcagtgagccgtaaaaattaaccgatacgccatttggaaataaccgccgaagatgaataatgcggagctgtggtaactccggttgcttaatctgcagaggaattccttgttgattggcatgcgctaaccgtttatgatgtggcatcttaatcatcgttagcggtaaatcaatcatcgcaatcgcctcattaggccgtaatggcgttgctggaagcttaaattgttgagccatcaacgcattatatcgcgataatggtaaaacaccagtagcgccagcacgcgtcattgaatcacttaacaagggcgttgccagttcaaattgggcatcgacaattttataggtagtctctgtgattttttttggtgtaacctgatgcgcccgtaaaatttgttcgacaccctttttttgatatttagaataaataatatctgcgggaatattttcacgcaatgtcttttggctaaatgtatagatcatcgctgcgctccccaacgctgtaatcgtcacagcgcttagaatggtaatcatccacaatgttttcgcgtttttcttaaaccgatagctcagattcgtcacactcaataaatgtgtgccccgataatagagtcgtttccaatggcgttcaattcggagccaaatctgcgtatacgcttggaaaaaggcaagtgtcccgatgacttcaaaccacaaaatggcacccaaataccccgcatcaataccatagccataacgccgttcaagttcgggcatcagcactaaaatacgttccgctaaataataaccactgataatcaaaacaatgccgattattccccagatggttgttaaccaattagggcgccgtattttgcggctaaactcggttgggtgcaataaatccactagttgatagcgaaaaattaaactactatttaataggccagttaataagaacagcaaaccgaaagtaatcgtcgtctgcttaatagctccccaggagattaaaaacgggattgcgacgctgatgcccatcatccgtaatagtaacatcccaaataactttgataaaaagattccgaaaaacagaccaatcaacagtgcaatcgttccgattactaaactttcggcgaagaataccacactaatctgcagacgcgtaacccccattacactgagcattccgatttcctgtcgccgtttcttcataaaaaatagattggcatacgctaggaaaaaggccgcaaataaaatgataatgatgctggcaatttgaatcgtcccaccaaaaattaagcgttcacccgccgattttagtttagacaacaccggatcagttttgatagccgtaaaacaaaagtaaacaacaatcgccataatacaggccatcaagtacgccgcgtaatcgcgggcccgattaatcgtacttctaacgaggagtcgtaacagcattgtagcgacctcccccaccaattgtcgcctgcatatcaatgatttgattaaagaactgttgtcgatcaccactgcggacaatctcagaaaatagctgaccgtctttgatgaagagaatccgccggcaataacttgccgtaaacgcatcatgcgttactaataggattgttgtcttctcctgatgattaatttccgttagataccgcaaaagttcggttgccgattttgaatccaagctccctgttggttcatcagccaacaataaagtaggattggtaatcatcgcccgaccacacgcgacccgttgccgttgcccgattgagatttcatctggatagcggtctaatagacccccaatcccgagaacttgtgtcacttgggcgagtcgcttttcgattaaggcgacgctcatcttatctaacgctaacggtaacaaaatattttccctaaccgtcagcgaatccaataaattaaagtcctgaaaaataaagcctaaatcatgtcgtctaaaattggctaacttagcctcacgcattttcgtcacaacttgatttttgatcattacttgcccatgtgttggccgatcaatcgtcgcaatcatatttaaaagcgtcgttttaccagcaccagaaggtcccatgatgccgacgaactccccttcttcaatctcaaaggaaatattatttaacgcattcaccagattaaaccgatggccataaactttagaaacttgttgaacggctaccactgtcattttgtcacactcccgaattaacttgctttacattttagcagagttttaccaaaaaacccatttaatcagaccttagttggttgtcttttaacttaaaaatcggtactatgaacttaattatgtctgaggagcgcttattatgtttgaaattatgattgttgaagatgatcctacaattgctaacttgattgctgaaaacttagagaaatggcagttaaaagccattatccccgatgatttcgataccatttttgaccgttttttaacggataaaccccacttagtcctactagatatcaatttacccgtctatgacggtttctattggtgtcgtaaaattcgtgaagtttctaaagtgccgattatcttcatctctagccgcagtactaatatggatatggtgatgtcaatgaacatgggtggcgatgattttgttaacaagcccttttcaatggaagtcttaatcgctaaaatcaatgcgcttttacgccggacctataactatgtcgatcaaaatacagacgtcatcgaacataacggccttctaattaacttacaaagtggtggggctcaagttggtgatactgtcgttgacctctctaaaaatgaatataagttactccaatttttgatgcgccaacacggtcaaattgtcagtcgtgaaaaactcctacgggcgttatgggacgacgaacgttttgtcgatgacaatacattaaccgtcaatatcaatcggctgcgtaaaaaaatcgaacaagccggtctggaagactatattcaaactaaaatcggccaaggctacatcatcccataaggagcaattatgacctttaaaaaatttattcgtgatcatctatttcacatcgtattcttctttggtggcatgtttgtcttagacatcgtcttatggctagatccccatatgcgcctggccaaagaaaccttgatgtacctcgatttcctattaacgattttcttttgcgctttcttgattggcctttacctctaccatcgtaaatggtttcgaacaattcaaatccgcctcaacgctaaagaagatgccctcaattggccactaaccggcgctacttcggctgaaaaacagtactttcaaaaatacgttaattcgctattagactatcatcaacaaagcatcgaacgtttgatgcacgctcaacaagatcaaaaagacttcattgacggctgggttcatgaaagcaaagtgccacttgctgcaacgcaattgttggttgaatcgattgaagatcaaatcccagaggagaaatttaatcaactgaccgacgagctcgtacaaatcgaacactacgtcgaacaagttctctattattctcgtcttgatagtttctctaaagactacttggtccaagaatatactttgaaaccccttatcaaccaaacaattcgtcaaaatcgaaactattttatccaaaaccggattcaattcaaattaactggtgaggagcaaactgtactgacagatgcaaaatggttagtcttcatcctgaatcaaatcgtctccaatgctttgaaatacacgcctcaaaacgggcaaattacaattgatttggcgcatgatgaacaaggtgtctggcttagtgtcagcgattctggtatcggtattcccgctgaagatttaccgcgcgtcttcgataaaggcttcactgggcaaaatgggcgtcaatccaatcagcgctcaactggcctaggcctctatctcgctaaatcgctaagtaacaagcttggccacgaactttatgccagctcaacgcccggaaatggtgcgactttcaaattactctttccctttttaagttactataatgatccagacggtgaacgtttgatgggcaaagaaaatcattttagataaatataatcggctagttcccctttttgaaggtggtactagccgatttttttattcactgactcatgcaactgttataataagcacattaaccagcgaaaggaaccaacgcatgcgcaaaacaatcatcttaaccctcgcttcactactcttgcttaccggctgtggtgttcaagctaaaaaaacgacccaatcaaccaaaagtacgaaagaagcaaccatcactaacgtcaaaccaaccacagaaaaaatcatccaaggtgccactcaaacttggaccttcggcaaaagggttggttcacaacaaacaaccaaaggtgtgtctgagcaattaaccatctcgccgaccaccagaagcgatgcccaaattaactggacaaccggccaaggtcaaatttctggtaatacagtggtctacaatcaagtatcgtttaaaacctggtctcggaaaacacgacaaagcgttactaaagaaggtcaagatgatcttcactttatgtcggtcactcaaattaaccagacactcaaaaaattaggtgccaatttcaaaatcggtagtttaaatgatctgatttatctagaaacaaagactaaaacgatggttcttcctgaagcggtcattgtcaaagacgaccacctatacactattaatatcgaatacattacgactgatcacacccaaaccctagaacgtggtgaagtcttcaatagtaccgcaacccaacaaaaaacaacgcaagtccccttaacgcagttaaatggtacttggactgtagccggcacaacggccagcgctaacgatagcggcaaagtactcgtcaaagacggctacctctatcaacaacgctatgacagttatgaacgctccgcaattcaatcgctggcttccgaatcggcagccacccttagaaaaagcgcgatgttcaccgatcagcaaagttctgcagccaaagctggctaccaactcactggtaaatcagttgccagtggcgatagtattgggtacctctacctctttgttaacaatcaaaaattagttcgtattggcgaaggtcttgcgaccgactaccaaaaaacaagcgaccaagtctctgaaaaagagttaccgcaacaaagtatcacgattttcaagcagatggatgataaatatcctggcggggttgcttcaacaatcaccactaaagcggatgctccaatcgtcggtatgagcgctagtatcaactatttgacggatgttactgccggtcaaattacggaaaataaatcagttacaaaccaaaaaaaggaatacgctaagcgtcttccttttttattaggcagcttcttgttgttcacgggctgcttcttcttttaatgccattgatgtggcaatcttggtaaatggcaagtagataatcgttgaaacgagtaagttaactgcggctaaacccccgccttgccaactaacacttgccataatcccaccgataattggtggtgttacccaaggtggcatgatggttgctgctggcactaaccctgtgctcgttgcaaagtaagcaattgtcactaagaccattggtgtcacaatatatggaatgaatagaattggatttaatacaattggtaagccgaaagttaatggttcgttgatattgaaaacgccaggtgcggcacttaagttaccaacaaccatgtattgtttgttcttacggccaactaaccagatagcgaaaattaaacctaatgttgcacctgtaccacccaagttaacaaatgaatcaaagaatggtttgttaacgatgtaaggggccactttaccagctttaatcgctgtgatgttagctgtaatagcaggtgcattgattgtttgcatgaatggttcgatcatgttggcaccatgtaacccgaagaaccataagaatggtgtaatgaatgctaataataaagctgaaggatagctgtttgcaagcccttggaatggttcttgaacggctttgtagaatgatgtcacgatattttcaataccaaaacctaataaaattgttgcgaataatgcaaaaatagaaatggtaatcattgatggtaataaagcagcaaatgacttagcaactgcaggtggtaccccatcaggcatcttgatcactaagtgtttgttacctaataagcgtctgaggatttcagttgaaatcattgcgacaattaaggccacgaataagcccattgaatccatgccagccaagccaccaacagcaaagaaagaacctaatgctgttacgcctgatgctagcggattaacatcgtaagacttacctaagttataggcgactaggaaaacgatgaagacagacaaaatagcaaatgtcccactccaagcgttccccccaaatttagtccaaatgtaagctttgtccgcgccggtaccaactgtctttgagaaaacactattcataaaattggtatatgccggaattggtaagttattgagtaaggtcgcaaaagcacctaaaatcatcaacggcattgttgtcacaaaggcatcccgaatggcaattagatgtctttggttcccaactttagcagcaactggtaagaatcgtttctccatgaaactgataactgaatccataaatctcactctctgtcctgttatttaaaagcctatataattgctattacaagtattatcataacggcttatgtaagcgttgttaaataataaccatactaaaaagcttaaattaggaaggttttcactaataaccaaaagaagcaccaactcacttaaatactgagttgatgcttcttttttaatttatacggtatataccattctcttaaaataaaatgttatttttttattagtgatgcatcgttaacggactaatttatcccaaataacgggcttaccagcaaccaatgatttcggtacatcgataatacgttggttactgcttcctctaaattgtaaggttaaatccatcttatcttgcataaagcgaccgtccactagaatatcgatttgcgataacaattccagtttatcgggtgactcgagcattaattcttcccaagtataacccgtccacgaccaaacgtccttagtctgtccgtaggtttcatggatgcgatcaaccaatgacaggcacgttttggtatttaagaaaggttcgccccccagtaacgtcaaaccttgaacatacggttggccaagatcatcaatgatttggtcctccagttctttggtgtaaggccggccatatttaaaattctgtgcaattcggttgtaacaacctgggcaggcaaataaacagccactaacatacaaactacaacggacaccttcaccatcaacaaaattaaatggtttgtaatccgcaatataatcctgactaagttcttcagacaaccattcttgtggtgccgggttcttaggcccgcgtttcgtatttcccattgaacaaactcctcaactcaaaatcgtttattgtcttgcaacgttattattatcattaccaatcgtgatgtgcatgtgtttgacacgacttgaaatttccttatgacgaccgtgaaccattggccgttgttgtgggttacctaaataaccacaagtccgtttaacaacgtcacacgttgctggatctgtgttcccacattgtgggcattggaagccccgttcagttggtttaaagtcacccttaaagccacacttgaaacattgatcaattggcgtattggtgcctaaatagccaacacggtcataagcgtaatcccaaacagcttctagtgccttaggattttgacgtagatttggatattcacaatagtgaataaagccaccggcacaatatttaggataatctttttcgaagtctaacttttcaaatggggttggcgccttgcgaacatcataatggaaactatttgtgtagtattccttgtccgtaatgttttcgacaatcccaaatttttgcgtgtctttttgacagaaagtattcgttaaactttcagcaggtgtgctataaactgagaaatgataaccatattctttttcccaatcaacacaatggttatagaggtccttaaccacgtctaacgtgaattgcttagcagttgcatccttttcccaatctgggccgaagaaggctgcaccgacttcatagaggccaatatagcccaatgaaactgttgcgcgtgaattcttgaagacttcatcaacactgtccgttttcttcaagcgtttgccaaaagcaccgtaacgataaagaattggggcgttttcaggtttagcttccttagcacgttccactttgaagacgagggcttccttgcagaccttcaagcgttgttctaaaatttcccagaacttagcttggtcgccagcagcttcaagcgcaatccgtggcaagttaactgttacaacacccaagttcatacggccactgttgacctcttgtccttgttcgtttttccagccttgtaagaaactccgacaacccattggcgccttaaatgaacctgttaattcaactaacttgtcatacattaaaacgtcagggtacatccgcttagttgcacattcaacagctagttgtttaatatcatagtttggatcagttggggctaagtttaaaccacgtttaacagcaaaaacgagtttagggaaaatagccgttctcttttccttacctaaaccttcaattctaatttctaagattgctttttgaatggcacgttccatccaacttgtccctaaaccaaagccaagtgtcgtgaatggtgtttggccttgtgatgaatataaagtattgatttcatattccaatgcttgcatcgcatcataaatatctttttcagtcttagtttgtgcgtaagctgtttgtttggcttcgccatcaatccagtttttagcatccgttaaatgcttgtcgtagttcttctgtgcaaaaggtgccaataattcatcaactcgatcagctgaacagccaccatattggctagaagcaacgttggcaatgatttgtgacatttgtgccgtagctgtttgaattgaatgtggtgcttcaacttcggcgttgccaatcttaaagccatgattcaacatttcttcaaaatcgattaaacaacagttcgtcattggactgtatggttggtaatccaaatcgtgccagtgaatttcaccttttagatgcgcattggcaaccttaggtggcaacatcttaaggcccattgccttagcgacggtgccggccgttaagtcccgttgtgtgttaaacacttggctatccttattggcattttcattgactacggtttgatccttagccaataatttttgaatcgtaaagttaatatcagttgctttattgcgggcaaaatcccgttgtgtccgataattaatatattcctgggcgatgtcatattgatgatgttctaatagtttgtgttcaacaatattttgaatttcatagattttaacgtctttatcaaaccgcgcaccgacttcgctcacgacgtcggttgccactgaatttaaaatttgataatcaagtggttctaattcatccttaacgtttttagcagctttaatgactgcttgttcaattttatccgctgaaaagggtaaaatacgtccgtcacgtttgacgactttaatctctaaatccatttttgggtcttgttcttcacgtatttccaacattgcaccagtctccttaaaaaaatcactatccccatcatagacgaattcaagatgccaagcaactatatatagtgtattagacattaaaaaaggcgtataccaactgtatgtcgtatacgccaattgtgcacaattttttctttcccgcgcccttatcaggattagcctgacgaggttcaaaaaaggattgacaagtttgcttaattttttaattttaatgtcatcgcattaattgccacgacaattgttgaaagcgacatcaagatggcaccaatcgctggacttaaaattaagccccaagcggcaaataagccacccgccaatggaattgctaaaatgttgtaaccagctccccaccaaaggttttgcgtcatcttccgactagtagcatgtgctaaattcaagaaatgcatgatatcgttcggattactcttaaccaaaatcacatctgcggaatcaattgcgacatccgtgcccgcaccaatcgcaatcccaatatcagctcgcgtcaagctaggggcatcgttgacaccatcgccaaccatcaagaccacttcaccctttgcttggtaatcttgtacaagtgcttccttatcttctggcttcaaattggcttgaactgtcataccacccaattgttgcgccaccttttcggcaacctgttgattatccccagtcaacatcaccggttggatatgacgctttttcaatgccttgatgaacgtcagtgcttctggtttcaactgatccccttgcgcgaccaatcctaagacagtttgaccttgaattagataactaatggaattacctttagccgccaaagtttcaaaggctgccgtatcaaatgcgatttgcttttcttgtagataatcggccgtaacgatttgataagtttgcccttcaattgcgcctgtcagcccgattccttgaatcgtttgtacattttcagcttgggacatcgtaattttttcagcgtcattataagctaaaatcccagttgccaatggatgacttgagtgtcgttccaaagcacccatataagccatcaattgagtttttgacatctcgccagttggttgaaccgcattgaccttaaaagccccttgcgtcaatgtccctgttttatccattaaaaccatcgtaatttgatctgccacttcaattgcttggcgattacgaattaataagccgttagttgccgcaatcgctgtacttcgagcaacaactagtggaatcgctaaaccaagtgcatgtggacaagcgatgatgaagaccgtcaccattcgttcaaacgcagtatttaaatcagctaagaaaaaccaactgataaaagcaataataccagccactaacgctgcgtagaaaaggtatttagcgaccttatcggccaaaccttcgacctttgacttttcttgttgtgcttgtttgattaacttcatcacctgcgctaaataaccactctcaccagtccccgtgactttaacggttaatgtcccgtcgccattgactgttccaccaattacttggtcgccagtctttttagcaactgctttggcttcaccagtcaccaatgattcgttcacctgactttgaccattcaccacaagaccatccgctgggactttttcgcctgctgccaccaacacggtttggccctcttgtaaatccttcaaatcaacagcgtgttgctgaccatcttgatcgaggacttgtgcttggccaggtaataaggcggccatcttctccatcgcactcccagcgctcataacggcgttcatttcaatccagtgacctaacaacatgataacgattaacgttgccagttcccagaaaaaatccatcacgtgcgtttgtgttgccaagaaatggttggcaataaaagcatataaactataaccgtacgataccgtaatccccatcgcaatcaacgtcatcatcgctgggttcttctcggccaattcgccctttgcaccttttaagaaaggcgcgccgccgtaaaagaataggaaggttgctaataagaggactaaccaatccgatcctgggaacgtggtttgaaacggtaatttaattcccataaaaggcgataatataataatgggaattgttgcgactaatgagacccagaatttctgtttcaaattacccatgtgcatcatatgtccaccatgcatcatcatatcgccgtgatcatggtccatatcatgcatatcgtgcatcttcatatcatcgtgtttcatcgttattcctccttttcacagtcacatttatttggcaaacagtcgcaagccactttttctggtgcagtagctgctttggctgtcagtaattgttgtaactgcaaaatatccgtctgactcaaagtcgtttgatcaattaaagccgctaatgtctgcccttttttcatgccacacaagtgctcaaaaagactttgtgtggcattttccatcgcttcaatctcaggaacggttgctgtgtaattaaaccgccgcccttccttttctgtttttaagaagccttttttaaccaagcggccaatcaatgttttgatggttgaatcttgccaatcgcgcttttgttgaagtaaatcaatcaagtcacgactgttgacttgaccaagtgaccagacaatgcgcatcacttcccattcggaagtcgtaatttcatttgtattttctgccatcttgctcacactctttcgtttacatttgtaattatatattcagtttacaatcaagaagcacttctgtcaatcattaatacttttgcgtacaaaaaagggtgttaagacaaaattacttttgtcttaacaccctttaaaaagtttaagcctaacgatctttcataaaatcttcgactaatttttgattttcttcgttgcttgtattgacgttaacagctgtttcaactaaatcagttaattcagttgtatctaaacgtttcatcaaactacgaactcgtaacacagaagttgcactcattgagaattcatctaagcccatcccgacaaggagtggtgccatgattgaatctccggcagcttccccacacataccagtccacttaccttctttatgagaagcgtcaatgacgttcttaataagacgtaagattgctggattataaggttggtaaaggtatgaaacacgttcgttcatccgatcagcagccattgtgtattgaatcaagtcgttcgtcccgatactgaagaaatcgacttctttagcaaattggttagccaatacggcgctggctggaatttcaaccatcatcccaacttgtaaatcgtcagatacagtttgacctgcagcaattaattttgctttttcatcttcgagaatccctttagcttgacggaattcagcaacagttgcgatcattgggaacatgatccgtaacttaccatagttagaagcacgtaataaggcgcgcaattgtgttctgaaaatatcatcacgatctaaactaatccgaattgctcggtagcctaagaacggattcatttcttctggtaatggtaagtaaggtaatttcttatctccaccaatatccattgtccgcacaacaactggtttgccgtccataccttctagaactgatttataagcttcgaactggtcatcttcactaggtaactcagctgaatccatatataagaattctgtccgatataaaccgattgcttcagagccattttcaagaacaccagctaaatctttaggtgttccgatattagcagcaaccgtaaatgttttgccgtctttagtgacagacttttcattctttagtttttcccattctgctttttgatcagcaaaggcttgggccttcacatcatattcagcaatatcagcatctgtaggatctaaaacaacatcaccgttaataccatcgacaattaataagtcgccagctttaacatcttgtgtgactgtttcagtcccaacaattgcagggatttctaaagaacgtgccataatggcagaatgtgacgtccgaccaccaacatcagttacaaaagccttaacgaatttaccgtttaattgggctgtgtcactaggtgtcaagtcatgagcaatcacaattacttcttcatcaattaatgctgggttagggagtgttacccctaataaatgactgagaactcgcttcgtaacatctttgatgtcagcagcacgttcttgcatgtatgcgttattagtcatagactcaaaagtggccacgaataaatccgcgacctctttcaacgcttgctcagcattaaccttgtcatcattgattttaccttcgatagcgccggtaaattctgggtctgctaaaatcatcatgtgagcgtcaaaaacttgtgcttcttcttctcctaatgattcagcagcaatcttccgaatggtctctagatcactcgtagaatcttgtaaggccttatgcaaacgattaatctctttttctgaatctgaaatagttgatttcgaaaatgacaaatcgggttgcactaacatgtaggctttcgcagtagcgataccatcactggcagcaatccctcttagtttagtcattattcagataaaccttcctttttcattgtttcttcgattgcgttgattgcgtctgcttcatcagcaccttcagcagaaattgtaacgtctgcgccttggccaacaccaagtgacataacgcccatgattgatttcaagtttacagatttacctttgtattctaagttgacatctgagttaaatttgcttgctgtttgtaccaataatgtagctggacgagcgtggatacctgtgtctgctactacgtgaaaatcgcgtttttccatgttaatcgatccccttttatctatttatagatttgttttggccgaaataagtagtcatcaatagtgtctaccctttcgaatattaagattaccattttttgaaaaatactacaacagtttcgctaacaaaattaatgatagtctacactataccgctttcagcgcagcgataaatcacttgtccatttcgttgggcagcgcctacaatttcttttcggtgatcataattgacccatactttctgaaagtctaaaaactcatcatgttcaacgacaatggtttctttttcgtgatttaacaaggcatccatctccgctaaaaaatctcttgccatctgaatcactcctttatcacgtctagataattatttttaatgaccctcttttcatttatcaagtagcgtcactgcctccaattgtacgcaattttgacccacaaataaagttttattttcgagttcgattacttgcaactttttttagagatgattataatttattcaaggtcaaagatagtcaaacaaactttgacgttacatttaataggcgaaaggttgtgacagattaaatgctttgtcaaaattgccaaaaaaatccagcaacaatccatctctacactagcgtcaatggtcaaaaccaagccattaacctttgtcaaaactgttatcaagcactaaagcaacaaggaatgagtagtcaatataatgatccctttggttttagtaatcttgatgaactcttcaatgcaatcaacaatccaaacgctgaacgtaatgctgctaaccaaggtccccaaacacaaggtggccgtaatggcggcggtaacaacggtcaaaatggcgaaagcttactcagccaatttggtgtgaacctcaccaaccttgctaagggtggtcaaattgatccggtgattggtcgcgataaggaaatcgcgcgcgtcatcgaaattctcaatcggcgtaccaagaataatccagtcttaattggtgaagccggcgttggtaaaacagccgttgtcgaaggtttagcgcaaaaaattgccgatggcgacgttcctgctaaattaaaggatcgccaagtgattcgcttggatgtcgtttcattagtacaagggactggtattcgcggtcaatttgaagaacggatgcaacagttgatcactgagctcaaacaaaataagcagattatcctctttattgatgaaattcacgaaatcgttggcgccggcaatgctgaaggcggcatggatgctggtaacgtgttgaagccagctcttgcgcgtggcgaattacaactcgttggcgccacaactaataatgaattccgtcagattgaaaaagacgcagcccttgcacgtcgtcttcaaccggtcgcggtcaacgaaccatctgttgacgaaaccgttctaattctcaaagggcttcaagataaatacgaaagttatcaccacgttcactatacggacgaggcgcttaaagcagcagcggccctttctagtcgttatatccaagatcgttatttgcctgataaggctatcgaccttttggatgaagcaggctctaagaaaaacttgacgattaccttgatggatcctaaggaattagaagccaagattaaatctgcagaagcacaaaaacaagaagccctcaaacaagaagattacgaaaaagcagctacctatcgtgatcaagtcacacagctctctgaaatgaaagctaataattcagttgaaaaatcccaagaaccaacaatcaccgaaaaggatatggaaaaaattgtcgaagaaaaaacccatattccagttggcgaattaaaggcgcaagaacaagctcaacttaaaaacttagcgcaagatcttgaagcacgtgtcattggtcaagataccgcagttgataaagtcgctcgttcaattcgtcgtagtcgaattggctttaataaatccggccgaccaattggctccttcctctttgttggcccaaccggggttggtaaaacggaattagccaaacaaattgccaaagaactctttggcagtaccgatgcgatgattcgctttgatatgagtgaatacatggagaaattcagtgtgtcaaaattgattggttcacctcctggctacgttggttacgaagaagccgggcaattaacggaacaagttcgtcggaacccttatagtttgattcttttggatgaaatcgaaaaggctcaccctgacgttatgcacatgttcttacaaattctagatgacggtcgtctaaccgattcacaaggtcggactgtcagcttcaaagacacaatcattatcatgacgtctaacgctggacaaactgatgctgaggctaacgttggtttcggtgcagctgtcgctggccaaacccattcaattctcgatcagttaacgaactactttaaaccagaattcttaaatcgtttcgacgatattattgaattccaaccattaagtaaagataatctattgaagattgtcagcttaatgcttgatcaaactaacgcgatgattgccgatcaaggcctccacattgctgtgacggatgacgctaaatctaaattagtcgatttgggctacaaccctgaaatgggcgctcggccactacgtcgtgtcattcaagaacaaattgaagaccgcgttgctgattattatttagatcatccagaacataagcaattaaaagcgcagttaaatgatgatcagattcaaattgtgcaaggataatatcaaatattaagatttattatcatattttaagattaaatccgtgttatataaatcgctttcagttatactattagtaggacttaaatgattagggagtgattagtatgagactcattaatattacaaattcttatcaccgtttagtaacacaacaattagcaaccactaaagccgactatgtgagcgtctattcgcttggcaaaacaacagtccttttcacccgctcatctaaaacgcgtgaaattcttctaaaaaatgacaagcgacatattcaacaagctgaaattgattttgtactcaaggaattagtagatattgattcaaccgacgatgttgaaatcctaaacgatggctcattagttgagattaccattccaaccccttctactaccgcctcttagacggttgaaagcaggccactaccgataactttggtagtggctttttgtatgcaatcaaaataatagcaattcgatatggcatatcgtataatacccattaagcttattgagggaggattttacgatgcaaactgttcaaaaagggcaacaaattatttgtcgtttagaagttggcgatgaactcatcaccgaattgaaatatttagccgctactttaccggaccaattaggtgccatctcaggaattggtgcctgcaatgatgttactgtcagtatttactcaccagacagcgacagctacgttgaaacgcgcagccaagaacaggttgaactcctatcattgagtggtaacgttgaaaatgcggatggtaagatttcaactcacttgcacgccagttttgcccgcttagacacaagcgtttttggcggccatcttgaacgcgccgttatttcaagaactggcgaactcgtcatctcaatcgtcccccttgctgttgggcgtatcttgcatcaaccaacccaattacaagtactcgatttatcataaaagatgattaaaagggattaaggcaaataaaatttttgccctaatccctttttttgctagccaaattagtcagcggataatgatgccctctaaggtgcacgctttttatttaaaattctagccaaattagtaacgattataaaccactctttttctaatttatgatagactagtattaagtaaataacgttccacaaggagtccgtatgaattttattaacctgattcaatcgttatttagacggcggccaaagcgcccaaccattcaaccagagacgcactttaatcaagctactcctgaaccagaaaacacaaatcaattcttcgagacagctgatcaatttgaaaaagaaccccaagcgcagcaaactgaacattttgtcacaacacctgtccaaccacgcaaaagttcagtgacgatccactacctcaaccaaaatcgaattccactgcggccttcgattacactttctggagtagttggcgctacgcttgatttaccgtggttaaaatttcctggctactatttagccgaaattacaaatttaaaacaacatttccatgaagaccccactaacatttggcttttttataaaccccaattagcggcaccagtcatggtacttcatcaagatttagaaggtggtttgctgatcaaaccccaatttttacttggcgctttgaatgaacactatcaagctaacccgttagaaggcggtgtgaacttcatctatcgcacttctagtaatcaaacaggacgttttagtgctgaaacgcagctagtacggttccaatatgatccacttaatctaaaatacagcgatgcccctgatcaaccgtttattgaattaaccgcatcggttgacacttacaaacggccgacagaagaagcactcacaacgacccgcttacctaagaatgcaatttggaaaatttatagttgtgcaacagctacctctggtcaacaatggttcaacctcggtagtttttggatttcacccaagcattatgaactccatgcaactaaccctaaggcaacggtcgattaccaagtccccaagtttaccaatcaatatacggttattgaaaccacaccgcttaatttagatgcgactttgaataacacaacggcaacgttatgggccgcgccttacgaaaaaccggctacctatcgccttgctttgaagactcgcgtgcacgtcaagcaagtgattgcgctcgacaatctcagtcggtggtgtgaacttgaaggtgggcagtggctattagaatcactactaacatttgactaaaaaaacatttttcaacgctatataaaaagaggtcttctgacaaaatcgattttgtcagaagacctctttttgattgtttaaaaacgtgcttagccactaggaatgcatgctcttataatttagctgttaatttaacttctgggtacttatcttggaaccagcgttctgcaaatttattttcaaataagaagagtggttggtcgtgaatatctttcaccagcaagttccgtgatgatgacatactttgatctaatttttcaggatcaatccaacgagctgttcgtgagccgattggttccataatcacttcagaattatattcatgttgcatccgatattggaaaacttcaaattgtaattgaccaacagcacctagaatatagtcgcttgttgtgtatgtcttgtacaattggatggccccttcttgaaccaattgttgaatccctttatggaatgatttttgcttcattacgtttttagcagtgacgcgcataaataattctggtgtaaattgtggcagtttttcaaacgagattgcttctttaccagtatgaatcgtatcaccgatttggaagttccctgtatcatacaacccgacaatatcaccggcaaccgcactcgttacttgttcacgagcatcagccataaattcagttgagttattcaaccgcatcttcttaccagtccgcgtcaacgtcacgtcaatcccgcgttggaattcacctgaacaaacccgtacaaaggcaattcgatcacgatgggctggattcatgttagcttgaatcttgaagatgaaccctgagaaatcttcattcgttggttcaacttgtgtttcttcttgtgtttgatgagcttctggtgctggtgccatatcaacaaaggcttctaagaaagtcttaacgccaaagtttgttaaggctgaaccaaagaagattggtgtttgatcaccagtagcaattttagcgggatcgtaagcattacccgcttcaccgattaattcgatgtcatctagtgcttgtgtgtaaacagaatcttccttcaaaggattatcgccagcaatcttgccttcttcatctaaagcaagataaggattggcttcatcttctggccgatacatttcgattcgtttgttagcaatatcatataggccacgtaaatctttacccatcccgattggccagttcatagcacaaccttcgatatccaataattcttctaattcagcaattaaatcgagtggttcgcgaccatcacgatccaatttattcatgaatgtgaaaattggaataccacgcatcttgcagactttaaataatttcttagtttggggttcgatccctttagcagaatcaattaccatgacagcggcatccaccgccatcaatgtccggtaagtatcttctgagaaatcctcatgccctggcgtatctaagatgttaatccgtttaccagcgtaatcgaactgcatcacagaacttgtaacggaaatcccacgttgcttttcaatatccatccagtcagatttcgcaaactggccactcttcttccctttaacggttccggcttgacgaatcacgcccccgaataataagagttgttcagtaattgttgttttcccagcatccggatgggaaataattgcaaaagtccgccggcgttcaacagccgtttttaattcagttggtgtcattgttaaatcctctctttagtgccaaagtcattaggcctcagacgcatcatcttttgcagcgaccgtcgttggtaatgttagtttcaaatctaataaacgtgaaccgactaccgaaccagttgttaaaacaatgccgttcggtaaatcgattgattctggatgaccactgacaggaattgcaccaatctcagtaatcataaacccagcaatcgtatcaacatcagcgatttgaatatccgtctgaaaggcatcattaaattcattaattggcatccggcccattaccttgtagtgggtctcgtcaatcttctgatacaacacatccgccttatcggattcatcttcaatctcgccaacgatctcttctaataaatcttcaattgtgactagcccaacaacgccaccatattcatctaacaagatggccatctggagttgagtgcgtttcatttcgaataataagtcatcaatcacaattgtttcaggtacaaacaagggttctttcatgactgtttccaattgtgtttctgagaagcccttctcacgtgcttctcttagtaggttcttgatgtgaacaatccctacaatttgatctttatcatcccgataaactgggattcgtgaaaatggttgtgctaaaatagcatcaatattttggtcattgtccgcacagatatccaccatgaaggcgtccgttctgggaaccatgacctctctggccatcttcttattaagggtaataatcccttctaacatttcgtactcgtcagattctaaaacccctgcacttttccctgattcgatcatatgaaccatctcttcacgggttagtttgggttctgtctcagaaaaatcaattggcgttaacttcatcaaaaccgtcgttgacgctgatagcaaccaaacgaatggtcgcaataaaacgccaatgaagcgaatcggttgaactgccgccttggcaatcgcttctgagcgatgcagggcaacttgtttgggatataattccccaaaaacaagtgagatataggataagacaatcgtcacaattaatacggctgcttccttcgtccaagccgcatttcctaaaaggggtgctaatctacccgcaatggttgtggcagcactcgctgaagataagaaaccagcaaacgtaatggcaacttggatcgttgctaagaaattattggagtggtttaaaacctccactaataagcgcgccttcttatcgccattttctgcttggttctccatcttcgtgcgacttagtgatactagcgcaatttctgccgcggcaaaaaaagcattcactaaggttaaaattaaaatcaacagtaactgtccccacaccggacttccagggtcaggattcatcgtcacatccactacctttcatcttataaattatcgtattgagccgattaagacctactatgcagtatagcatagtcaaaaatggaaattcaacccagtaagagtcgttaaaatcgccttcaaatcagtcttgtgcgattataatttagtcgccttatcgactttagtgcgtaaggcttgaatatcgtataaataaacaacaactgttttggtaacggcataaaacggaattgctaaaatcatccccaaaataccgtagatattgccggcaactaacaagataatgataatcgttaatgggtgaatatctagggaacggccaatcacattagggtaaatcaagttcccatcaatttgttgcacaataactactacgacaatcaccatgattgttttcggaattgaaattgataaactaataattaaagcaggtgcaatcccaatataaggaccaagatatggaataatgttggaaacaccggcgataaagcccaataagtaggcatatggcatcccaataatcaggtaaccaataaaggtgaaaacaccgacgaataaacattctagcgcttgtccgccgatataagctgaaatggttgcacccattttacgtaataaatcagcgacttgatcgttataacgatctggtaacatcttttgaatatttggaatgagtcgatgaccgtcttttaacatataaaagagcatgattggtacggtaaagacaccaatcgtcacactcgtcacggccccaatcatgctgccgaaaccgctggtgaaactcttcatgatgttttcagcaatcttagaaggttttaagtctaattggttaacgtatttattaacatcgatattcttcaaatgcggatttgttgagatcttatcaatcatgtcctgcaagcgatgcacataatctggtagattcgttaccacttgtgtcacttgatggattaattgtggaatcgctaaagccacaatgaagataatcccgccgaaaaagacgatgaaaataatcgcaattgcccatttccgtgatatttttagcttccccagtaaattaatcaatggattaaataggtagaacaataaccctgccccaatgattggcccaaacaaggttgaaataaaggtccctattggatcaaataagaaactaattttagtacaaacaaaaattaaaacggccaagattaataattcagttgaccaaaacaacaattttgattgacgcaaacgctcaaacataaacattcctccacttgacttcatcgaaaataacgcctaattgtgctattataaacacaaagattatttttattgtaccaaatttcattgtaaagctacataaattcaaacgattggtggttttttcatgcaaattaaacaaacacgtgatttaacaagtccttactatcaagatggtctcgctattcgccaagcggtttttgtcgctgaacaaaaggtccccgctgaaatggaaatcgatgaatttgaagaccaagcactctacttcacaggttatctagatcaacaacctgttgccacattacgcgtattgaccgagggcgacttttatcacgtgcaacgcgtcgctacaatgaaagcttaccggcaccaagggcttggattagagctaatgcaagcagctgaagcatccgcaaaaaaagccggtcataaaggccttattttaaacgctcaagtcacagccgtcccattttatgaacgcttaggctaccaagcaactgataaggaacgtttcttagacactggtattttacatcaagaaatgattaagatcatataaaccgttggcattcttacaatctttaacctataataaatattaaagtctgaccctgttttcaaagagaggtttattatgtctaaacaaaaaatatttttcgttaatctatttttcttcgttatcccttatttactagttgttacaattgctgccatcgcttatgacagtttggttgtgcatagcgctacttgggatcgcacaatttttggtggactcgttggcgccacattaattctctttacaaaagtcccacttgaacgcccactcaccatcatggccgaacaaactaagaattccgttatgcacacggttttgagttttttcatcattagtcgttcaaatgcttataaaattggcaacttcattttagatttcgtactcttttgcctcgcaacttatttactaagaaacttcctatcggcatcgtttattgctggtagcctacttggttggtgcataattgccatcttaatctcaattagtattgcaaccgctcttggttttaagacattaacaatccaacaagatacatcggtagaaaatgattagcatgctttgtctttgagcatctgcatagtattaagcatgattttttagtcatccttttccttaaggatggctttttttgtgggctaatcaactaattttacaagccttttggcaacttgttacacttaaccataaagagtgatgaaggagatgatgaccatcaacacaattgctattatggtagctgctgatgaacagtatgccgatcaactgctactgacgcttaaatcaattcgagaacattgtcctctagaaaccgctgttgatttatttgttttgagtagtcacctctccccaacaactaaatccgcagttgcccgtctattggcgctccctcatcatgtctcatttatcgcaattaatcctcgccgtattaaaaatttcccaggaaataatcattttgaccagaccgcgtattatcgaatcctagcacctcaaatactgctcgctaaacatattgaacgtgtgctctatctcgatcttgacacgctcattcgtaccgatttgacaccactatacaatagtgatttagaaaataacattatcggtgccgttattgatcctggtaaagcgctgaccttaaagaggcttggggtccctcaatcccaagccaataatatttattttaatgccggcgttttgctaattgacacggtactttgggaaagacaccatatcagccagaaaattcttgcgatgatggttccttatcctggccgccgcgttaatgatattcaagatacgctgaacgtggttcttgcagggcgcgctaaattattagcaccacagtggaacgttcaaaataccattttatttaaaacatacgaaccaattaataatgagtatcgtcagctttttaaacaggctattaaagcaccgaaaattattcacttcaccaccgaaaagaaaccgtgggaggtcttcttaaatcatccctatatgcccgaatatcaaacttatttagcacaactgcctgctgacaagcgtgatcaaatcaatattgtttctgcagctaactctaatttcgttgaacccctcgccatcttatatgcttcgattcttaataataacgatgataaccgccattatgccttctacgttttgagcgatcaactaactgctcgtgatcaagcaacgttacgccaaattaccgcccgcttcaatgccgagttaacctttattgaagttgacgaaacaccactaacggcggtcattcaagatgaccaagttttaaaaactgcctattaccgattactgattcctaatctactacccgagattgaacgcgtgctctatttagattgtgatacactttgtctggaaaatctcgcgcgtctgtgggacgttgaattgggtaacataccagtagccgctgttgaagatgccggcttccataatcgattggctcaaatggcaattgactacaagagtattcgctacttcaatgccggtgttttattgatgaacctaaccatctggcgccaacaaaaaataacggaacaaattttgaccttcattaaagaataccctcaaaaattacgatttcacgaccaagatgccttaaatgcgattttacatgatcgttggattcacttacaccccaaatggaacgtccaaactagcattttgatggactttatcgttgcaccgaccgaacggattaaccgtcaatttctaagtgcgcaaaaagaaccgggactcattcatttttgtggctcagaaaaaccatgggataaaagttcaacccatccttatacacctcagtatcgcttttataaaagccgctttttagaaaataacaatccggtgccttttagagcaaacaccacttttgatgaatatcattcttaaaagaaagcaaaaaaagaaggccgcacaatctgtgcggtcttcttttgctattaagactaaatagtgttctaacggtggtgagccaattcttgatatcggttataccagatatcaatatattccttcgaaaatggccctttgccattgttgatccaatctaccaaaactttgacattggctttcaatatccgatcagtttcggcagaatagtgccacttcgcactatgcgcttcatattcatcgacgtctaacaagcgtttctctccgtttggaaagaccttcacgtctaaatcatagtcgatatacttcaacgcttcttgatccataacgtgtggcgatgccaaattgcaataatatgaaacgccgccttcgcgaatcatggccacaacgttaaaccaatacttcttatggaaataaataagtgccggctccctcgtgacccactttctgccgtctgattctgtaactaaggtatgatcgttacaaccaatgactgcgttctcgctggttttcaaaaccatcgtgtcgcgccaagtccggtgtaaactcccatcgtgtttataactttgaatcgctatatagtcgccttctttaggtgcattcatcgacctacctggctttccaaggttattattcataatcacctatcattatagcaaagactctcaaaattacctaaaactttctaccgctaaagtgagtcaaatcgttgcgccattttcttttgaaccgttggcattgcaatttctgctagagctgcttttgaataccattcacctgggaaaaaggccaagtcgctgtcttttgcaatcgtcgccgataacaacgtaatcgtccacttcaaatgggtaaaaacgtgcgtcaccggtttgacaggcaccggttttaaatgcgctaatgttaaaccatacgcctctttgaagtaggcttcaattcgagtcatttgctcttctggcgttaataactcagactcaccatcctgtaaatcttctgccatcaccaaaggataggtcgttaaattagccagcaaacctgtgctaggtcgcttttggaataaaaagcccttttcagattcaatcacaaccgcaaaaagcgcaaccggttttggtttagccttcttcgttttaaccggataatccaacaacgtgccatcttgataacttctgaaaaatggtgctaattcggtgtccccaaccgttggatttttggctgtacaaacttgcgaaccaaaatccatgacagcctggttgaaatcgccaggtcggtctttgggaattaacggtaaaatggcgtcgtaaaaaatactacgattcttcggattcgcaatatcagcgtcaatttttaataaccgactgaagacccgaaaagcattcccgtcgattgcgggaaccacttcgccaaaacagatactggcgatggcgcctgctgtatacgggccgataccggctaatttttctaactcagcaaatgtttgcggccatttgccctgatagtcatcaactacttgcttagccgctttttgtaaattacgcgcccgtgaataatagcctagcccttcccaagttttcaagagcaactcttctggggcagctgctaggtcttcaacggttggaaaagtcgctaaaaagcgttcgtaatacggaatcaccgtttggacttgcgtttgttggagcataatttcagacaaccagacccggtaaggttcttgattttgacgccaaggtaaatcgcgacgatgttcgtcgtaccatgccataaaagcagtctgaaacgcctcacgttcactcggtgtcatctgatacttcttggtcgtcgatgaaacggttgattgcatcaatattaaatcctttccggtaaagtgcttgttgcatcttcatccgccgctcgcgcggttctaataggcgataacggcgccattttttctcgccaagggctgccaatgcatctgcttcactatcactgtcttcttcaagcgctaattcgtcaataatccgacttaaattatcaccaccaaagcccttttgcatcaagccctgtttaatcttttgctgttgttcgaagaacgaactgtggcggtacttcttcgctagcttttgggcagttgctaagccgactgtcacttgttcttcatctgtatataacgtcaatgcttgatcgatatgattagcactaacccctttttgaatcaatttttgtcgaaccactttaggccccttatccgaagtattaatcaccgttctaacataactgtccgcgtaatcctgatcatccaaataatgtagttcgcgtaattttgtcaaactggtttcaatgccttctagcgtaatttcatgatcacgcaagtattgtgttaattctttttccgttcgtaattggtgacttaaataattcaaggccagttgataggccttggcattgtcatcttctttttgaatgtcacgttgtaagctactatcgatttcgagcccttttgcaagccgaaacttgattaagacactttcagtcaccccaaaggcaaactgctcgtcgataaaaatgttatagcgccctttttgtttttgtgaggtaattttagtaatctgtggcatcttattttctcccgttacgtgtcgctttgacgttcagataaatcttaaagccaatcacgactaccgctaaaatcagggtgccaatgattaatggcaagctcttcgcttgaaaagcatagattccaattgcaaggactatcaccatcgcaattaaaaattgatttcgttcccaaaagttcatcgttattcgctccttcatggggagttaatactaatccccggctactgacatacttcttatttaaatgcatttcatcaattatatcctcaggccataaccgacttgcatcacactctatttaaacgtgttctgcaagtcatatccctccggttagcgctgcctgtcaaataatcgctaacgcaatttttcgcccggctgtgctaatcctcaggccataaccgacttgcatcacactctatagagtagcataaatcacaacgcgcaacaaaatcgaacgctgttagtttccgattagaatatccgttttttctaaccgggttctgttataatagggtacagcaaatttcgtgctatttacaattttaacaatataggagttaattaaatgccagaacaaacaactactaatgaagtcgaagtcggccaacgtttcccactgaccatcaagcgaatcgggattaacggtgaagggattggttattacaaacgcaagattgttttcatccccggtgcacttcctgaagaagtcgtgattgccgaagtcacaactgttgccccccgcttcatcgaagctaaggtccacaagattcgtcaagaatcaccacaacgggtcacacctagagatgccacttacggtcaagttggtgggattgaattggaacatctcagttatcctggccaactcgcctttaaaaaggatatgatgatccaagccttagaaaaattcaaaccacacggctacaatggctatcaagtcactgaaacggtgggcatggaaaatccatggcactaccggaataaagcacaattccaagtgcgtcaattaggtgaccatttaggcgctgggttatacgccccaagcagtcatactttgattgaccttccagaattcgcaacccaaactgatttaacgatgcggattatccgcactgttttaaaattagtcgaagacctcggcattcccgtctttgatgaagaaaagaacgccggtatcttaaaaacaatcgtcgtacgtgaatctttctcaaccggtgaagcacaactaacatttatcaccaattcacccaaactaccaaagaaatatgcgctaatcaccgccattcaagctgaattacccgaagtggtctcaattatgcaaaacgtcaacaaagggaaaaacgtcttggtatggggtgaccaaacaatgcaccttgccggtcaagaaacgattatggaaaacctcaacggcgttcagtttgaattaactgcccgcgcctttttccaactcaatcctgttcaaaccgctaagatgtataacttggttaaagaagcactcgatttaacccctgaagatcgcttagtcgatgcttactgtggtgtcggcactatcggattaagtcttgccaatcaagtcgctgaagtgcgtggtatggatacaattgccgactcaatcgaagccgctaaacataacgcagagatcaacgggatcgacaatgtggattatgccgttggtgcagctgaagacctcttaccagaatggttagataacggctttgtcccaacagcccttgttgttgatccaccacggactggtcttgatccaaaattaatcgatgcaattctcgacagccggccccttaaattcgtttacgtttcatgtaacccttcaacgctcgcgcgggatcttaagacattggttcatacctaccaagttgaaaaaatccaaccgttagacatgttcccacaaacggccagagtagaagcaatcgtcacaatgagattaaaaagaaatctataaaaaatgagtgctattcatagcggttatactctgaggactagcctaatcaggcgaataaccgatgcaatcggttgtttgactgatgtcgctagccacaagagtatgctatgaatagcacgttatgatttgagtgctttcaaaggtcgtttaccgccgagcactaatctaataacaaaaaacaaacaagccatcctttaaaatgaggatggcttgttttagttttctttcactttagctctcaaaaagaacgtcacaagcggattatcactgtctgtttctaactgatttgtttttaataatgccgtaattaataacgctaagccgatgacagccgaaataaaggcccaaccgcgagattgctgactatagctggatgcaagtccatttaaaacccataaggtaacggcgccccgaccgtttaaaccagcatcccgataacgacgaatactaagtgcaagtgttggaataaatattcctacagcgataattgcaaagatgcccaaataaatccaaggattaataccagctacatgacctttagtgattaataactgtcctaataatataaatagtggtatataaagtattaatattattattcccattacccaccaataacctgcccgcgtacttcggcccataaagtcaaaataacctttaaagtaatcccgaaatgctgtcttaattgtcactttaccaggtacttcttgaatttcacgcatacttttccctccagttaactactatccattaattgtaccgcatatcgtctgcaatttgatacaatggtaaaaacacattggaggctcattatgaaaatttattttgcaaatgcactcttctcacaagctgattttgattacaatacgcgcgtggttgctgcgttacgccaagcaatgccaaccttagatatctatttgccacaagaaaacgcagcgatcaatgataaagaagcctacgctaattccgaaatgattgcccaagctgataccgaacaactggttgccagtgacctagtgattgcggtcttagacggccctacaattgacgttggggtggccagtgaaattggtgtcgcatacgcccgtaacatcccaattgtcggcctttacacagatagtcggcaacaaggcgccacgaattcacaaaaggtagccgctttgcaaaccattgctgaaaaccaattccattacctcaatctttatacggtgggcttaattaaattaaatggcacgatcgtcaactcagtcgatgctttaatcgaaaccgttcaaaaatactaagaaatagcggccgttaatgccgctatttttttgtttctatttttaaataaaggcgtatgctagtaatcaaaaggagctgatttaatatgtatgatcaatcgataaaagaatatcgctgtaatatttgtcaacaaacaatcactgtcaacgaacactgttggaccaatattcaattaccccctggtcgtttcatgaacggttatatggatattcgcgaaaccttaaaaattacgaacgcccaaataatttgccaaagttgtgcccaacttatcaacaagtcaatcgatttggaccagattcgaacacaagcctcagatactaaatcatgacaatcaaaaaaggattcaaagttgatagctttgaatcccctttatgtcgaggtagatagcttggttgctgcttgctgattctgttgtttactctggataatgttacacctcaatactatattcaattgtaattaatcgtttgttctaacctactgcttatcgtattactcgatctagtttagtcgtttcttggtgattgactctgcgtgcagcttcagcgataacgattaactttgcgtttgttactgctacgatattctttaacagacatcagcctccgatatactcgcacttatacgctttgattttgcaattaagttgtcattggacccacttcctagcaatcactcagtgtacttttaccaatcttatcttgcgatgtgttgttgtgattttggttctaaaactttaacaatttgtaccttttgttacttagtacctgacaaatacggtggcgcttaacaaatgtgattcacttggttttgttctgccaagctatctttcctcaccattaatataccaccttatgtaaccggttacaactaaaacacctcaattttttgaattaattttgaaaagttttaaaatgctgatataacaaggttttaagctaaaataaaaagacgattcggataagattaacttatcgaaagcgtctttttgaaacgtgccttatcaacctgattcttgcgtttagctacgtcagttaaataatcgataaaaccgattatttccctaactaggctaatcctcagaatcatcccggttgctaagccactctatcttgtcatatatattctttcgtggtccttcacgccttttaggataattggggcgttatccattgtgaggtcaatttcgtattcactaccgtcttctggtagttccatttggaattgggtttcgtattcgaccatcgtgagttggcgacggttggccaatagatcagcatgtttttgctttgctaattgtttttcgaaacctggttgtagaatccctgtgaaaaattcgctaacggcacctgatccgtaactgaaaagaccaattcgatcgccagcttctagattagttgagtgttccaataatgaaagaaagcctaagtatagtgcacccgtatagatattcccgatttgacgactgtacaaggtactttcagcatagcgttctaagagttgtgcttgttgtgtctcactgccttcatctagaattgtccgcaatgcttttagccccatcttagtataaggtaagtggaaagctaaagccttaaaatcagcgattgtccgacccgttttagcacggtaatcagcccatgtcttttggaagaattcgatgtattgttctgtggaatatttgcctcgtgcaaaggcctctttagaatagtttggacgccagaaatcttgaatgtcttcactgtggatacttgtttctggttcaagaaccatcaaacgtggttgggcactgaccaacattgcaacggcgccggcaccttgtgtcacttcacccggtgtttctaaaccgtagcgcgcaatatcagaaccaatcaccaatgccttttgatccggatgagccgcaacataatcataagctgtcattaaaccagcagttgccccgtaacaagcttccttaatttcaaaagtccgtgcattgctgagacctaataagcgttgaatatagatagcaccagctttagattgatcaatgcctgattcagttcctaaaatcaacaatgaaatattgtcgcgtgattcaccttctaataaatccaaagcggcgttagcgcccattgtgacactatcttggcttaatggtgcaatcgccatttgatcttggccaatcccaattgtaaatttatcagggtcaacaccacgcgcatttgctaacatgacaagatctaaataagtatttggggtaaaaaggcccaatttatcaattccaatttgcataataaacttccaatctatctgttttcagcacggatttgacttaataaagtcgtcgctgtttcagtatttaagtgcggtgcttttaataattgtggtaataacgtggttaactcgctagctgtcgcgccgactgcaattgcgagtgatttagcttggagtgccatgtgccctttttgaatcccgtctgaaacgagagctttcaaggccgctaaattttggcctaaaccgatggctgcaattacgccagccaattcttcggccgtttcgatgaccatcaagcgctgagcaacttgaactgtcggtaaaataccgattgaaccaccgacaatgccgactggtaatgggacggcaatttgaccgcgcagttgatggtcactagtccacgaccaatccgttaagggttgatagtgtccggtgcgtgcggcataactatgcgcaccggcttcaatcgcccgccagtcattaccagttgccataatcacagcatcaatcccgttcataatccccttattgtgcgtcgcagcccgagccacatccaactgagcaaactgagtcgcatcaatcagccgttgtgctactgcgtcacccgttaaggtcgccgttgctaaagtctccggattaagtgtcactgaagctttaacaacggacccaaaggcagcgttcgtcaaaacactcaacaaaatagtcccacctaaagtcgcttgtacggcgtgagcaattgcttcacaaatggtattcacaatattagcgcccattgcggctttggtatcaatttcaagatttaatttcagaaaacgattttcaacgatggttgttgtgattttctgcaaaccaccacctcgtttgacaattgacggatgtgctttttgagcgaccgtttgcaaaatagcaaaatggttatccacccattttacagcatctgctagctgaggtaaatcagttaacacgacttcaccaaacatcacccgtcggctactttcaattgtaacgccgccatttaggcgcatcatctttgctgcgttattagccgcggcaatcactgatggttcttcgattgccatcggtacttgataaaccttgccagctaccataacatcttgcacaatgcctaatggtaagtgatattgtccgatataattttcaatcatactatcggctaattcatctgctaaaggttggctttgtgctaaaaattgcgcatctttttctgaaagttggttagcttcaaccaagcgtgctaaccgttctgattttgacagttggtaaaactttggactagtcatttagccacgcctcgttcagttggatttcataagcaatccctaaaccaccgccaatacataatgaagcgaccccagttgttttgtttgttcgtttcaattgatgcaataaagttgtcataatccgtgtgcctgaagcaccgattgggtgacctaaagcaaccgcaccaccggcaacgttcactttggcagtgtctaacgctaatccgttttgaacggcaacacttgaggctgcaaaagcttcattgatttcaaataaatcaatatcagcaaccgtttgatcttgtttagccaacaattgttggatagcaggtactggtgtgtaacccatgtaattagggtccaagccaacttcttgataaccgactagtgttgcttggtaaacaagaccgagtgcttctgctttttctttagacatcacgatcattgccgaagcaccatcgttgattcctgaagcattggccgctgtaacggtgccgtctgcttggaaggctggtcgtaatttacccattgcttcaagcgttgtatctgggcgaatcccttcgtcttggctcacttcgaaggttgcgcgtcgttgttgcacagttacggggacaatttcagcatcaaaccagccagcttgcgttgccttagccgctttttgatgtgattctagagcgaatgtatcttgcatcaaacgtgtaatgccgtatttggcagctacgttttcagccgtaatccccattggtttatcggtgaaggcatcatttaaaccttcactactaatactatcgacaacggtttgatcaccaaacttactgccaaaacgcatccctttattcaaataaggtgcttgtgacatgctttcagtcccaccaactaaaacgacatcggcatcgcccatcacaatcgcactttgtgcaagacggatggccttcaaaccagaaccacaaacttcattcacagtcatcgcaacgctcgtttgtgctaaaccgctatttaatgcgatttgacgagcaacattttgtcctgaaccagcttgtaagacattgccaaaaatagcttgatcaatttggtcagcttcaatgccagctgcttgaatcgctgctttagccgcgattgtccccaaatcgactgcggttaaactggctaattgaccgccaaacttcccgattggtgttcgtttggcactcataataactacttctttcataatatccctcttcacttataagtctaattattactataactaaaaatctggtgattgtatgcttaatttacttttctttaactaatttttaggattaatctaaaaataaattaccattttaacggccatttggtttactcattaacgtaagcgattcaccggtgaccttacaattaaaaacttggaggttttcaatatgcaaacatcatggttaacatcaacaattgcgttcgaattacaaaacgaggcttatcaagacgatcatctcatgcggcgtttaagcgccgtaaaagaaaacgtacaagctgacgaaatccaagcagtcggcgaagcccttgctagcctacatgatgacgatcaattcatcatggcagaactcacaaccaaatctgtttataacgctaagtaaaaaacataccaattctttaggaggaattcaagatgaaagaacttaatttagaatttaaaacgagtgttaataagagcaaaacattacgcctacgccaagtcaacgaatccttaacccccgaagtagttaaagcggcgatgaccaaaatcgctaacgccaatctcttcgaaaaagatgacgttcaactctacaaaacaccagtcgcagccaagtacgttgaacgaattgaaacaccaattttttcggataaataagtctgtgtatcagttggggctatcctgagaattcacaaaagttcgactataaaacaagcgtccgggacaaattcaaatttgtcctgggcgcttgttttttctttagatgttctttaaattttaagttgttcgcttgtcaccatccttgacttaggtgtacgatgacccttattaagttattaaggtaggtttagcatgtcactttcaaacacactaaccattgactggcaacaactgttgattgccattatgcgcaactgcgcactattaattttaatgccactaggatttgccgccttattgacggtgattaaccgctcaacgaaaacgcgcttagcacgctggtggccccgctcacagattgtgattggtggcctaggcaccattattcatgaattgagtcacgcgttattttgtctgattttcaaccatcaaattactgatatgcaactactcaatcgcaacttaaacgatcctaatgaccactccctcgggcacgtcgaacatcgctaccgttctggccgtctgtggccaacaattggtaacttctggattggcctagcacctattttgggttgttcagccgcaatcttgggcctcacttggttactagcgcgcaatacgtttcaaacctggctgacgtttgccggagaaccaacttggcaatggcaggcaatcaaacccttattcagtcaactcttgatgactactaaaccgagcttcctatttatctggttgatcctctgtggcatgattgctatcggtggttttgacttatcaaaggctgactataaagggatgattcccgggattatcgcaaccctgatcgttattatcggggtcaccttcatcgccagcctattcaattccactactggtggcactagttggttactcaccatcctgacaccattaatggtcattttaacaatcgtcgtcttactctcattgattagttggctgattgtcgccgcactacttaaattgacgcaaaggagtcgatatcatgcgcgtcattgatttattacaattactcgccgatacaccgcgcaacgcactcatttttttcgaaggctctgatcaaaattggccgattgccgactttgaacaagatatccacaatgaacaaccgcgtctgttattacaaacggtcgccaagaagccgcatcccctcaaacaatgggagttcagtctccttttgaaccatcgcgaatactatcaacactacgtctacgttaatcaagatgaccaagcttacccactattcggcttccgcgttgcccaaaataaaattctgctcggataatgctacaggtcagccgccaaagcggttaaatactggtgacttgcaaccatttcccgcgcatcattttgatcagccagctgaacttcatagatgttcgttgctgccgaatttaaaaccggcacaacccggcgccaatcaatgcggccggtcccgagttctaacccatcatgtttaagtcctaacgaatccaccagatggtaatgggcaatcgctggttttagcgtctgtaagctctgaactaacacgtcattatcgccatggtacttaataaaacagtgactcgtatcaaaagctaaccgatagcccttcgctaaaatggcttgatccaaatctggattaccgtaataaaagagtggcgaaatcgaattttcgaagaatagatgatcatgaccaatcttattaagatagtccatccgcttaaaaagcacctcagccgcttcagcgagattgcgataaccaactgtcaattgctcgactggttcatcatacgaaccgtggactaataattgaacatcttctgcttgagcgagttgcaataagtccaacgttgactgccacaaaaagcgatagcgcgctggtgaactggcctcactcatcgataactcaagatgaccgccttcaaaattcatcggatggtgtaagataatgtgctgcaccccttggttacggataaattgaatcttatcgcgcagcctttttaaaccagcacttgcgacatcttcttccgtcagatgaaattcaaatacgctgggatgatattgtaaacgatccttaatttgacggtcattcacacccgcctttaaccctagttgcatagcctgacctactttcataattcaacgttagtttcattttaacacttagcaaaaatgctaatcaattatcggctcagcaccaacctcaattcgttttcaatgtttattcatgagatttttgctatgcttaggttagttaataaaggaggtctttttatggatcgttatgccgttatttataatccgcattctggccaagatcatggcgagtcagttggtaaaaaaattgaacaagccctcgttaaaaaccagcagacggttgaattgatgcctactaaaggccctaaagatgcgacacgcttagcaaaaaaagcggcgcaagcgcagttcgatatcgtagtcgctgtcggtggtgatggcaccatcaacgaagtcgttagtggcctagctactttagagcagccaccttatttaggaattgttcccgctggtaccgttaataatttggcccgcgttttacaaattccgttagatattgaccaagcgattgaaaatctacagcaaggccatctccaaccactagatgtcggtcaaatcaatgatgactatctaatcagtacgatgacgcttggtattttagctgacgctgctttgaatgttacccagagcgagaaacaaaaatggggccccttggcttttttaaacgaaggtattcgtgtattagccaagcatcaacattaccctttaacaattgaaacccctcatcgtcactggcaaaaagacacacagttcttgctcgtgacactcaccaattccgtcggtggttttacaaaattcaatcccgaagcgcaaccagatgatggctatttccatgtatttgtcgctcctaaaatgtcattaatgcgctctgctatgtttctcccctattttctaacaggcaactttaagaaaattcctggaatgacctactttaaagctgataaaataacaattaccactgacaatcaagaaagtgtgcaaacacgcattgatggcgatcctagtaccaaatcaccgttaaatatgcggttattgcaacacaaattacaagtcatcacgcctcactaggctattaaaaaagacaaagtcttacgactttgtcttttttctatttcgtttcattttcttgataacgttgataaagtgattctaagaattgaatttcagttacattttgataagggagcacatagaaattagcgagaccgtatgtcacaccaaccaataattgccagaaataaaatgaatattgcatgattaagaattctaatttatagccatgcatgattttacgactcatgttaatcgcttcgctagcagtcatttcaggatttttttccaataagacattagtcattgcgtatgaggcccctttgacaactcccggaatgacgaataacaatgaccagcagaattgatagaaggtggttaaaacatttgcttttaacacccggttcttttgcgcttttactaagtagttaaaaattttcaacccatcggcacgctgacctcgtaaagtaacgattgcgcaccactgtaaaacgggtttgcgtaaacaagcaattaagaatagcactattaagagcataatcaccactacaaaccataagaaaaccgtaaatccggtcggaccttggtcagagtagaggttccccaaaattgtcatttcaatggccgtcatcattctgccaaaactcattaccaaaagaaatgtgacaacaatcatccccaccaccaaccacaagatggtcttcatccattcgccataacgtccggataatttacgttgagcttcctttttgatgtccgcccgcgtcatatttaacccctcgacttggtctaattggagtgccatttcttcatccgttttcaatttttcaaaacggctcttcacactgtcacttgttgcgtttggattggtcatttgttcgatgttaaacccacatttgggacaaaacttagccccctccttgatctccgaaccacaatttggacaaaacttcatgattatcttcccccactacttaatattaattctcttttatactactattattaacttcttttgaacagggggttaattaaaatcacatattattcgtttattgtctattgcgcgcgtattttgcttctaccttaactttatctgcttgccaccacgcttcatgatgacgataccagtcgattgtctgttgtaacccaactttaaaatctgttaattgcggttgccatccgagttcctcctggagtttggtcgcgtcgatagcataacgtaaatcatggcctggtcgatcttgaacatgatcatatgcatctttggattgtcccatcaatgttaaaatcatttctaaaacagcttgattagtatgttgtccatcagcaccaatcaaataggtttcgcccattcggccccgtgtcaaaatcgtccaaacggcactagagtggtcatccgtatgaatccaatcacggatattttggccagcaccatataatttagggcgcctaccacttaaaatattggtaatctgacgcgggataaacttttcaatatgttgatacggcccataattattggaacaattggatatcgttgcgcgtagcccaaatgagcgcacccacgcccgtactaacaaatcagaactcgccttggaagcggagtacgggctactaggattataacgtgtttcgggtgtaaattttgcatcacctactaacggtaaatcgccgtaaacttcacctgtagaaacgtgatgataccgcacatgatattgtcgacaggcttcaattagcgtataggaacccataatattagtttgaataaaaggtgttggatcctgcagcgaattatcattatgactttcagctgcataatgtaccaccgcatccaccttttggactaactgctgaaccaatggtgcatcacaaatatcaccgactaccaacgtcactcgttctgctggtaagccggctaaattagcccgattaccagcgtacgttaacttatccaaaaccgttacatggacttctggctgttgccggaccacatagcgaacaaaattagaaccgataaaaccggcaccaccggttacaagaatatgacgtatcatttatcaaatctcccaactacttgttatcacttatcatagcacggacaacaaaaaaagagttacccagtaatttaaaccaggtaactctttaaacagctttttctaaacattcaataccttattcaagaagtccttcgttctatcgttttgtgggttgccgaagacatcgtctggggtgccttgttcgacaatgtgcccgtctgccatgaagatgacacgatcagccacttctttggcgaagcccatttcatgggtaacaacgaccatcgtcatcccttctttggccaagcgcttcattacttccaggacgtcgccgaccatttctggatccagcgctgatgttggttcatcgaataacagaatatcgggtttcatcgccaaggcgcgcgcaatggcgacccgctgtttttgaccacctgaaagtgagcttggtttggcatcgtacttatcagataagccgactgtttccaaaagatgtttagccgtttctttagcttcttctggtgtcattttgcccagttcaacaggtgctagtgtgatattttcagcaacggtgagatttttaaagaggttaaagtgttggaacaccatcccaattttttcccgaatctggttcaaatcgctcttacgatcactaagattataaccatcgacgatgatttcgccactcgttggttcttccaaacggttcaaacagcggagaaaagtactcttcccagaaccagaaggcccaatcataacaaccacttcattgttgccaacggttaaatccaaatccttcaaaacttcattactaccataatttttaatgaggtgggacacttcaattctattcattagttattcattctcctctcgatatacttcgataaccatgtcaataatgtaatcacaatcaagtaaatcaacgcgatcatcccccagattttgaagccttctaggtttctagcaatgataatcttgccggcttgcgttaattcgacaatgccgataattgataagatcgaggtatccttcaatgtgatgatgaattggttaataaaagatggcaccataatccgaatgccttgtggtaagatgacgcgacgcattgctttgccatatggtaagcctaaactacgggctgcttccatttgaccagcgctaacggcaccaatcccacctttaacgaaggcggctgtataggccccttcattgaacattagtgtaatcacaccagcgaccattgcgggaatcttttgccccgtcaaacttggaatcccagtgtagatgaataaggctaagactaatagtggcaagccccggaagatataaatcactgtatccgaaacgccccgtgcaaatttattcggtaacacgccgagtaagccgaagaagacaccgaagatggttgcgaagaagatcgcgatgaccgttaatagtaatgtttgacctaagccatctaagattgcgcccttattttcttttaataacccgaagaaactgtgatcagcttctttttcgctagatgctttagtgtttaaatattttgcttgaattttagcgtattcgccactggcttttaacttcttcaagcccttgttgaatttagcgactaattctgggttcgtgcctttcttaacagcgaatccgtagtcgccgccttgaactggctttgtgacaattttcaagcccaaaccagtcttaattccgtattgcatgactggttcatcttcgaaacaggctactgagttaccgttgacaacatcattgtacatattgtcggaatcatcaaaagtaaccgttgtaaagccgtactctttggcctttgattttgcataatcaccagcagccgtcccagtcttaattgcgacccgttggcctttcaatccttttaagccagtaatcttactgtcttttttaaccgccatgacaacgcctgtgtgataataaggatccgcaaaatcaaatttggctttccgttcatccgtaattgtcatcccggcaatcacaccatcaatctgtcctgattggaccgcttgaacggcggcattaaagccgagaggttggatattcactttgaaaccttctgattttgcgatggccttcatgatatcaatatcaatcccgacatacttattatccttattcgcaaattcgaacggtggataagtgacatcagttccgatttcataagttttctcagccgcttgcactgattgcacctgttgactgccaaatacaaacagtcccagtaacaacaaactactcaaaaataacgttattttcttcattgtgaatcctcctctataccctcttaccggtcattaaaattaaaaactaataagtttagttataatgctatactcataattataatcaaaaacacatactttgtcgaatttttattcattttgtgcctaaaagataaactttttatttattctaaatgctaaaaaaggcaattaacctacccggttaaccacctttatttcgagcattagccgagtttaacgacatccgccaatgcttcattaatttgatgacaataatctttttgaatttgtcggatctcctgtaatttttctaatattaacgaatcgttctctgtttcaatgattgataacattttttcaacactttcagcgtatcctctaaaagcttcctttaaccgttgattagtttcagtaaaataacttggcggattaatactttcagtcaattccacaaaatgtcgcaaattcaccaaattcttctggaaatacttcttcaaggaatgcagattctcattaaccaaacatctgcctaatacgatattacggcaggtttgtgtgtattcgttaaaaaccgtatcaaatactaataatttctcaacgacctggttgcagcgcatgatataagtaaccgacgataacgtttctgtttgacttaacattttattatttctcccctctattgttatagagcttaaagtcttccaaattctaatagttaccattgtatataatacgataaaccgtttattagcaatgttaatcgctttctttttttctaattttttacaatatagaccattaaggccatttatatgaccgctcggtgtaatagtttactaataccacaaacaataaaccactaaatctatcttgcactagaccgctttaatattgattagcctattataaaattcagctcatataaattaaattaaattttataaataaaattatattgtcaaccgttattttgtcccaatttgggcagttcgtgaatcactttgagcaacatgattctgttataataggcttattaacttgtgaggagtttttttatgattaagccgattatgcatgataccgaatttttgagccaggtggccctacctgccacaactgcagatacagcagttatcaccgatttaattgatacattacaagctaacaccgatcgttgtgtcggcatggctgctaatatgattggcgttaataaacggattattatcgtccaaatggggattctccctgtaattatggtcaatcccaagattatccgtcacagcaacccttatcaaactgaagaagggtgcctatcacttgttggccaacgttcaacaaaacggtatgaaacaattgaagtaagctatcaagatcgccaatttaaagcacagcaacaagctttttctggctgggtagctcaaattatccaacatgaaatagatcattgtgagggcatcctcatttaattcctattacacagccactagtccgatttggtctagtggcttttttatatcactaaaaatttttttaattaatttaaattaattaaaaaattaaattcggatattatactatttgccgtctaaaaaatcagcttagttctagcatttaatttaatttattttcgaaacaaaaattaccgttgcgacatttatattaaccgttcaagtaattagcgcttttaacaatcgtcttttaacgccatattaatgacttaaaagggcataataatagccatttttggtaaaaacgtgacaggttaaagatgctattttattaagaatagtgatagaatattaaataatcaagtaatataaggagcacttttaatgttaaatattgcattttgtgacgataatcagtgttttctaaaaaaaatcactcaagaaatcgatcgatcattagccatcaaagcaacttatcagacttttacaaatgcaaccgacctactcgatgcctttaaacccggtgtattcgacgccctttttatcgacatttatatgcccaaaattaatggtaaaatgttagcccacaaaattcgcaatcttgataagcgggtaaaaattatttttgtcacccgttatgaacaagaaattctaaataccctgcaatatgatatctatgattttctacctaaagatcatctcagtgagcgtattgataacttactggcacggctgagtcgctctgtggcttttgaaaatagcaaatatctcagactgaaactacgcgaaacaactggtgaagaactctataaaaaagtctatcttgatgacattatttacgttcaatcactcaatcggaaagtttatctccatctggccgatcaaacccaatttgaacttatcggttataccttccaagaaataacagattcgctagttgagaagggatttctgagaacgcatcggaaattctccgttaatccaatttttattaatgaaattaaaaacaccagcatcctaatggataatggtgaagaactagatttaagccgtcgacgaaaaaaagaagttcaagaagcatttatatgcggtatacgggggattctcagtgactaatctaattatctacgttacaccgactgtgattgaagtgaccatcctttatgtactattgattttatttttaaatacgcgttttattcaacgaagccgggcgattgctgtgctaatcacactcattgcgatagattcatacctgactatttttatttctgaatcaataccatatatccgtgcactgctaatccccatcgctgtcagcctttcatcaatattactatttaaagataaaataattaaaatcttttactttgttgcattaggttactattttgtttatttctctgatattttttctgggttaatcctctccaaccttctcaataaaaatatcctacaagttatcgacgttacagatttttatggcatcctattctatattctgacgaagtcgatcatgttgcttctaatttatggctactaccactttttcaataaactgaatttaaatatttcgtatcactatttaatgattatgaactgtattttaatcattggtgccatcctaattgacaatttcatgtctatcatcagtggcaacttgcaacttaacaatacgggcccgttatcccataaaatactaattatggttattttactcaatatcactatctgcttaacgatttacctattttcacaactaagcctctactatcaaaatcgtgaatttgaacttaaccttcaagcggcttctactgtcttaaaaaacgaaattaaaattcaaaatagaaaagaacttgaactcagtcatatgcgacatgactttaaagaaaacatcatgtcaatcaaatacatgattgaaaatgagcttgatactgaagccattaattatatcaaccagattacagggcaattggagaaggttaaagcccaggttttaaccgggaatgtctatattgatgccgttttaaacaacaatattcaactatgtgcttctaaggatatcgaactctcacttaaagtggaccaagtccagactgaatcgttagaacccgtttccctctccaacatactaattaacttattaaaaaatgccgttgccgcaaccgaaaagctgccccctgaaaaaagaaaaattagcgttaagatttttgaatacaaacacaaattggtattaatcgttaataactctcatgccgaaacccatttaggtagtagggtaaacctttctaacaaaagttggtttaagcatgaacatcacggactaggtatcgggattattaagaagagcatcgatcgactagacggtgattataaaatagcctacgatgaaacacactttgacatgcttgttttattacctatcgatcaaaaataataatggcggtgttggtggcttggaaaaccttacaaaaatgattactaatctactcgttagaaaaaaagtgatttcagcagacgaacaagtcttctacaattatggcgttgagctaacaattaatgagtttttgattacggcctccatcttattatttgggctcagcactcatcaattttggctcactgtcggttatgtgattctctttagaatcattcatacacaaaccggcggctatcactgtcggacctatttaaattgttatctgacatccgcttctctggctattgttgccatctatctcgcgcaatggctattattcaataccactgtcgcgattattttctcgcttctatcagcccttgctttctggtttggaacaccgcttatagaagataaacgtgttaaaaatgaaaaatttaagcgtaatcggatcacaattgccgctttctgcttattctcagttttgtgtctatgcttcaactttttagtcatcccgattggtgccgcaacactggcaactttagtgctagtcacaatatcccatttaaaggaggtgatatctcatgaaaaaagtcctaaattacgttagagaagccatcgtattaaagatgcgcttaaactcaaaaactgtttctgcaggctggagctacgaagttaaaaaaccagctgaattagacaaatacctaaagagtattgactaattcattacacaaaaaagatcccgtcaattgacgagatctttttttgtgctcaattactaaccgcgatggtcagcactcttcacttaaacgtgcttctcgaactgccttttccggttaaccacaaaatgggaatcatggctaaacccgccataatccccattttcttgttaattctcaaagccaacccgttcgagtcagcactttatttgttttctttcttttcgctttgctttaattcttcacccaatttgatgatgtatttcttcaaatcatctttgacttctgggtgttttaaaccgtattcgatacttgtttctaagtaaccaaacttgttaccaacatcgtaacgacggcccttgaattcgtgcgcgaagacgcgttgtgtcttgttcaattcgtcgatagcatctgttaattgaatttcgccaccaaggcctggtttttgattttctaggacatcaaaaatttccggagttaataagtaacgaccgataatggctaaatcactaggtgccttatcaacatctggcttttcaacgaagttcttaacattgtataaatcatctttaaccttgttttcagggttaatgacaccatacttgtcaacttcgttatgaggtactttcataacagccaattgtgaggcatgtgtttcttcatattcattaattaattgcttgctcaatgggaccttatcttccatcaagtcatcacctaacatcacaacaaaaggttcatcagcaacgaaagacttcgcaagacgaacggcatcccctaaaccgttaggatgtgattggcgaatgaaatagaggttaacacccatatcggttgtttcattaaccatcttcaacatcttcgtcttgttcttagcttttaagttttgttccagttcaggtgctgaatcgaagtgatcttcgattggacgtttgcctttaccagtaataattaaaatatcttcgatacctgaagcttttgcttcttcaacgataaattggatcgttggtttatcaacaattggcaacatttctttggccattgctttagtggctggtaagaaacgtgttcctaggccagctgctggaataactgctttgcgtactttcatttaaagaatcccccattaatcatagtctaatcatagtatgccataccctagccgatttgtgacccctaaacgctcaaaaatgaggaaaatattaatatattaacatctatttgttaatagaatcacatttatattgtaagcgcttgttaatatttgctatcctcaattgaatagtttattaggaggtttctatgttactactacatacgcgtaccgtcccgctccaacacacagtttgtccagattgcctacctttaatcaaaaccgtcgattatgatctgcgctttcgtgaatcaattagttgcccgtatatcaaccattatcgtattaattccgataccatgttgctagcgactaataaacatcgcagtttaattatcagtcgtaacaacggcctgcaagcgacgcccctttcaacccgcaaactaatgcgccagtataaccgccaacaactcattgatttctcacaaatgcgacatatctatcataccttcggccacctacggaaactaccgcaaatcaacggtgaatatcaatttctaccgctcagtggcactgcccatcaaaatgcgagttggttagcgctacactacgttaaatactacgaacaagctggtgatcatctgcggattactttcctgaatgaaacaaattgcgaactcctctacaaaggacgtcagttagaggccgaaatccatcaatgtgccgcaatcggccggattctacgcacgagcctcgggatttgcgcaactaacttcggctataccatcgaactgcaatcttgctttaacagtagtattatccacagctatgattactgtcattgccaattatgtagcatggtaccgaataacccacaacaattgattcggctcctagatgacttagaaattcacaaatcaaattatatctaccaagcggccatacaagaatacaaggaatatccgattcatgaatttagctggtatttacaaggtgtgcccggttttatcaggaaattacgcgatttataaaacacccgaaatattggcttttcaccgattttcaaggttaaataatacttgtttcagaaattactacttacgaattcctataaaaccaacgtttcattctgattaatcatcaaaaacggtcgttattcttttgatcgccaagtcgttatagtgaacttaccgggaaaattcactgcgagctcgcggcctaaaggatgagatacaatgaccaaatctaaccaagccgctttcaacctcttactccaagatgacaactttatttacggggcgctcaaatcactccatattaatcgttatcacgagaatttcgatgatttctaccaagaagccatcctgaccttcattgatgcctatcagcgctttccaggcgatcccgaggcccaagaacacgaattcattgtctacgcctaccaagcgattaaatgggccaccatgcgccatttcagacaggaaaacggtcggaaccaacaaattggcttcgttaaccgtttatctgaagacgatgccttaatggattatctcgaccaaattagtgacccccgctgcgacccagacaatgccgtcatctataacgacctcttcgaaaaactctatcagatctgcgatccccgtgaacgccggtttctagtcctacgctactttgccaacgccagtctaaaagaaatcgccgcggacttaaatatcacacgacgaacggctaataatattaaatttagggtgcaaaagaagtttagtaaattgttaatctaatgaaaagagactctcattctatgagagtctcttttcattagtccatatttaagtcattcttaatcttacttgttgagataccttctgttcttggtaagtaaataacctcgcattgatcttttagaaaatcaaattgacctttccaatcgtcacccattacgaacatatcaatatcatacttagcaacatcagttttcttttgttcccaatctgtttcaggaatcacttcatcaacatatttaatagcttctaaaatatatttacggtgttcatagctatggtaagcttctttatgtttaatttgattaaattcatctgttgaaatagcgaccactaagtaatctcctagtgatttagctctttcgagtaaatgaatgtgtccccaatgtaataaatcgaatgtcccatacgtaataactttcttcatttttaatcccccaattatcttgtataaaaatttcaaaatacaaacctactatctcaatagtttaacccacatgatacattctaattcaaatatcttttcgtgaaaaatctctgctaaatttcattgtcataaatactaataaaatgtataacaaactatatattattgaattaactagcatactgaacaacagattatctactgaaactctataccgtaatccaattattaaaataaaaatgaataaaataaggtatttaaaatgtcgtttaaaaataatctttaattctattgattttcttaccataaatattctggccatacaaacaagcatttcggtcaaaataattgttaacgtaccaccatctgctttataaaaatgaactaatatgatatttaaaggaatgcttacaaatgctcctaagatataagggatagaatattctttatacataccttttgaaagtgcatactgatttgcaaaaacacctccatacggaataaatattagaattaagcttacccagaacatattgttactcattagcgtgtactctctaccaaaaaaccacggaacaaagtctctagcatttatcatcaacataaccgtaagatacaaagatattataagagtatagtccaatgacttcttaaatatattttgaaattctgcatcttttccatcgtcattacttaattctgccatctttggcattattacggtacttacagaagtaattagagttagtaagcttcttgcaattttttgagactgatcatagaaagtcaactgtacagcgcccgctataattccaaccagtgtactatcaaaacttgtatataattgaatggcaatttgtgggatacccagtattaaggactgtttaacatatttttttgagattaacgatcttgctacaattgataaatctaatgattctcttaaactcaaccaaaaaactatatttgcaatacatagcgtcacactatttatcaatatatacattgtcagatcactagttgatcgaataaagataaaaattaataaaactgatagtaccttgattactgaattctttaagataactttttttatgcttcctaatccgatataataccacgaaatatctagagtaaaacctattaaatatgggatattggcatacatatagactttcttattactcattgacgctacaatgatatatataactataacaagtataccgatacacagttgtataccccataaatttccaaacttcaaactaagagattcttttgttctttcggcttgtgcaatagttttaacacccaattgattcataccgattaagattacaaagctaagaagtaccccaatagacatcacataggaattaatacctaatgatttgacacctaaaattcgagcaacatatggaattgttactaacggtaatgcaattaataataactgatatatagaattgtaaaaaatattacttactacttttttcacattcatcagtctccttttttattaatccgttaatatattccaatatattttcaacagttttaccatcttcataattttctagatacttttctaactctaaacttttagaaacaatttgattcattgacacattatttattatttcaactaattctttactatcattagctacatataacggaagatcttctaattcacggtaaaagcccctcatatttcgatatttttctttatcatagcaaaatagaagaatcggtctctttagtaaggcataatcaaagaaagacgaagaatagtcagtaattaacatatcagttactaataaagtgtcctccattgaaaacgtcttactaacgtcaatatagtccacattcaaattactacccaaattaactgtaatattaggatgaaatttaataagtaacttacatttttttcctacttttttttcaatactctttaataaaaactctggtttcaataagtttaactgatattgaccattttcatcctctatatctcgaaaagtaggcgcgtagcacacggtatatacatcttcagatactcccatcttctccctaatttcattttcgtgctctctatcattcctgttcaacatatcgcttaccctaggagttccaattctcccaataggtacattttttgaaaaagctgatttaaatatttcttcactatatttattcccagccagtaataaatctgtactacttgtattaacattactacgcttaatatacctagtagataatttctctttagcatcattttcaattttttttaatggcgttccatgccaacattgaatatatgtttgattatttttcttgtgtacaaaatccattatagaatttccaataataaatttagctttacttaattcatatgctgactttaatgaataattgtacacagcagaatagttattaggtattatttttttcacatcatttgttctatattgccaaattattgttgagctttgcatatttttgtaaacagcatcactaataattctgggactatcactatatttttgtcccccaaagctactaaaataaaatgttttattttctactttagtaaaataaaaaaatatagggtaaacatacataaataatcctttacgaacgctcctaataagccaatttacattattgattgagaccacctacaactttctttagactatcactaactctattgtacgaatacaattttttaattttatttctatccacattctcaaatttagaatccatagccttttctaaagaaactgatattttttttatttcatcaatattagttgtgaaaaagaattctttaaaatcatctgctatgtctatttgaccacccgaattaggacaaacaattttgcaactaaagtaaagggcttctaaataaaccataccaaacggctcgtgttcattcaaagaaacgaaaactttcgatcttgaataatattcaaaaagttgttctctattctttctacctaaaaagtttacgttaactcctaacgtagttgccaacttttttaaatactccgcttcttgtccctcaccaataattacgacattaagttttctagaagaccttccaacagcttttatgagtaaatcgacatgtttggcttctactaaccttccaacaaataacatatctatatccttttgttctcggtttactatattcgtaacttcgaaaaagcttggttctaacccgattggaatcaccttatcgactcttgtatcaaaaatgtctttatttattaacttagtgaaactactattgcttactaaatagtcgaaatctttagcatatattttatctatgatcatcattattaaaaatctgatttttgaataataacctaatgatgtaaacccatgaagataatgtatttttattcctttgtgatatccgattacactaattccgtaatctagagaactaattattaagtccggattatatcttttaactgcttttcttattctaatgaaatcaaatagcctcgatcgactattgataatattaatccgactattttcttcccctttttctctggtaaaaatatgaacgtcatcgttactttcgataaaagcattcaatagtgcctcatcaaataccgcaactccgccaaaatttttgcttgatactactgggcctataatagcaattttcatactgctctacaccttcttaaatggaatcaaatgctttaatatatttcaatgaagatttctcccaattaaattcttcagatagtgccatatcattcaaaacatccattttaatagccttatgtatgagtctaatgatttcattataattattcgaatctaaaatatatccatttaatgagtcgtggacaacctcgcttactccaccaacattggttgaaattatcggaattttcgcttgtgcagcttcaacaatagaaataggaagattctccatagctgatagactaagaagaatattataatcactaatatctatcttgctgacctttcctttaatattgacaaaattatatgaacttaattcattgctaagctttttatcaaaaatttcaccatagatgtctatggtgaaacttttgctaagctcactgtttttaattaacttaaatattttcttagctattttatattttcttttatcgatatttccaatcattaaaatacgtggattaattttattagaagattttattgaactaatttgatttgtcccatttcttattaccacactatgttttgcatacttctttgtaaatttctgatgcatataataagatacatcaactgttattgctgcataactaatagtttttttgtaataatgtatgaaatagaacgatttaaaaaacatatcactacttacatatcttgcatctggccaattcccatgatatgtatgaatataaggtatacccaccgtcttaaataaatagcctaaatgatcatcagaataaccaattactttatttgtgctttgtttcaatttaagtacgtctttcagcaatttttttgaattactacactcaataacggttatattcttatattcattgacgccttcattttctaacgtaaacacatatattctatcgaaatatttactccaattatctacataatgctgagttgctacagtagcaccagtgtaaaatccatattttttagttataactataagatctttcatcctcattttctcctttcgtatttagaattccaatcaacagaaatattaatctaaaattccctaaatcaagaaaaaacatcggtattaaaataaaacttacaacaaatcgtaccggtattttcttaaaaagatcgctgattagggagaaataagttaccacgcccgcgaatccatagtctaatattagatttaaataagtattatgtgtaggatgttgcatgccaaaggaactgtaactcaatggaccattaccgagtattggtctcaacggtaaataatttattacagttttccatatttgaactcggttatcttcctgaatatttgaattaatttcagccgtacgatctcttcccaataactccaacatctttagaaatacatcattgataagtggaattatggtatctttaaataataaataacctaggaatgataagaatataattagaagcaacttcaaatatactttccgtttcttatgttcattaaattcaataacatatgtaatcccatagctcgctattgaaagaaatacggttcttgataatgaactaattgcacctacaaagttcaaaagaatgctatctttatgtttatcatcaagttgatacatgataattatcaagaacaggaaaaacaagaagtacttattcggatctgaaaaaaagccgctcacacgggtttcatgaaaatcattataaaattcaactgtcaaaaaaggagaagtcacaggttgaatgttatattttaaaaatagtatacatacctctattccttgtactatcaatccaagtgcaattataaataaaggctttctgatattatcataatcaatagttaggttactaaacgagaatactgttgcaatgcataagaaatacctaaaaatttcaattccagtgctaatatttaaattactttgattgatgaaacttagaataataacaactaagaacataatactcattatcgatattcttaatgaaacgattttatcttgtcgtatgattcttatcaataagaagaaaatcataaataaatcatagaatttaataaatgaaaatcccactccaaaataactaaacaacaaaatataaataacgaaacatttttcattaaataccatatttttatcgaataatattaaaataatgcttaacaacagcataataattatcaatgggctttttattgtatatgccaatggcgtgaaagcagtaataagcaacaatagaactagattgctattcactttaaaatattttcctatcattcgtataattactccttaaagacttttttatattttaagtatgctttccccatgtgtgtcattgtttttatacttgatttaaaaaaggaatcatttaaacttctatgcacaaaataattcatctttattgatttaaatttatttgaagattttgactttttttgaattctatacgtcaacaaactatcctgaattccatacgctttaatatgttcagtcctcaatatgcgtaaccacattaaataatcctcatgcaaataatctttttcaaatctatacttcttgataatatctcttgccacaacaacagatgaggttgcaatactattaaaataatccaactctttaaaagagacttctaggggtatacaaaaaactcctggatattgttctccctcagcagacatatacttcacagatgtatttgaaaatagaatatcattctttttcatgaaatttacttggatatctaacttcctactatcccataaatcatcactatcaataaaagctacgtattgccccatagatttttgtatgcctaaatttctagacttagaaactccttcattttttggattattataaattttcaccctgctgtccggaatatcttgcattagtttctttaatctattattttccggatcatcattgataattattaactcaaaatcttggtagttctgagttaatactgaatttacagccgcttcaaacgtatcttctgattgaaaagctgtcattattacacttacttctgggacatccatttatcttgcaccatcccctgttgccacaactctgattgtttcaaagaaaaccttaatatcctctttaataccgaagtgttcaatataataattatccaattctgccttttcacctggtgtaatatcataaccaccatgaacctgtgcgtaaccacttaagcctggtttaattcgtaaccgttgttcaaaacctggatattcttttgagaattgttcagtgaagttaggccgctctggacgtggaccgattaaactcatatcccctttaatcacactccacaattgtggtagttcatcaatccgtgtcttacgcataaaatggccaattttagtaacacgggggtcatttttttgcgcccacattgcgccacttttcttttcaattccagcatacattgagcgtaatttcgtcactttgaacttcttacccattaaaccgacccgttcttgtgaatagaaaacaccgcctggtgtttctaaccgcacaagtaacataaataatagaatgactggtgacgtaatgattagaatgatgctcgcaaacacaacatcaaaaacgtgcttgattggtatgtaaggatgttctaacatgccatccaatttttcaatatatgagtcttctcgaatactactttgatttttcttcatcattgtttccaaaagtatccccctacttttcctgtaatgcgtcccaatattttgctaacccagtattaacatcaactttaggttcgtatcctaaccctctaagtttcgtaatatctgctacagaatcctgaacatcacctagtcttgcctcttttttttctacttttaatttttctcctgaggcactctcatatgctccaataacatcaattaaactaattgattgccctgttgcaacattgtaaacgtcccatttagcatctgatgtagtcgctaaaattaataatgcatcaacaacatcatcaatataaacataatctcgagtctgactgccatctccaaaaagggtgaatacatcatttttaactaaacagtctgaaacaattgacagtaccccagagtatggtgactttggattttgctttggcccatagacattaaagaaacgtgtgcatactgttggtaaaccatacaacttaccataatcaaccataaaccgttcagttgcaaacttatcaattgcataaggtgacattggatcaattgatgaggtctctttctttggaagctcaggtccatttccataaacagctgctgaagaactaaaaactattttctttggcgttaatttttccttacggattgtttcaaggatatttagattagcattttgattaacttcatgcgtttcaattggtctttcaattgaatccgcaacgctcgcaatcgctgctaataagtaaatataatcaaagttatttgtaattaagagatctgccatgaacgcctgcttagtaatcgattcattataaaatgtcacattcattgattgtggtaaattttctatatcccccatagataaatcatcaataatcacaacttgatctccatttttaatcaatctatctgccagtgtggaaccaatgaatcctgccccacctgtgattagaactttactcattacttatatcccccaattgttattttgtttcctccgcaccataatagccgccataataaccgccatagtagccaccagtattttcaggtttcacacgattcataatagttcctaaaattcgcgcatgaactacttctaacaactctttagatttagcaatagaacgcttatcagcaattccttgtggcgccactagaattgtcccatccactttacttgctaaaatttgcgcatctgtcactgaaattacaggcggtgcatcaaaaatgacaagatcaaagtgctttgttaattcaacaattaacttatccatttttttcgtatttaacaattccgatgggttaggtggtaccacgccacaaggtaaaacgaataaatgttccaccggcgttttttggatcgtcgtgttaaagtcaaattcatcttcggttaacaaagatgttaaaccttttttattaggtacttggaaggtctggtggactgttgggcgacgcatgtccgcatcaactaataatacattaaccccttgatcggcccaagtaactgcgacattagcactgattgttgatttaccttgtgaaggacctgatgacgtaaaaaccaaactttttaatttttgatcaattgacgagaattgaatattcgtccgaattgtccggaattgttcggcaatcactgaagttgctgaggttaaagtaattaacccgaccccttctttcatactatcttgatctagttttttttcttttctaaataatcccatgactacttaccctcttctcgataatgtacttgttctcgtaatggctttcttgattaaatctttcggtgcaatattattaacgacacctaaactagttaggcccaattcttctgttaagaaactttcatctttaaccgttttatccattaattcacgaataaacgcaattccaataccaattaatagccccaatattaatccaatcagaacatttaatttattcttgggagaaactggtgtcaaattaggtttcgctttcgaaataattgaaacattatcagttccactcattattttaggggctttcttttgaaaggtcgttgctgtcatattagcaatatcagctgccgtataagcattatctgcttttgcagttactgagaaaacttgtgaattttgattatttgaaatactaatcatcgatgcaattttatcgttatctaatttagtaaacttgttatcgttaatttttttggcgactgaatccataataaccggcttcgtgattagatctttataggtattaatcatttgcacatcggtttgaacttgattccactgtgcacctgcgtcagtactttgcttacgattaactagtaactccgttgaagcactgtattgtggggtaatcacaaaaaacgttaaaatccctgctactagtgtaaaaatcactgccgataaggcgataagacgacgatatttccgtaaaacaccgaaaatctgttcaatattaattgtttgttccatgatatcctccaaatgttaattgcctttgtagttttagactacatacgaaaagaagttaatcattactgattagctccttacggtattacttcaaatctaattgatttctgagtagtgttgacatatttgaaacttcatcaggtgacattacctggaaggattgaccatcaatcatctgacctgttcccttcaattgctttgttttaaagttcatcgcatccccataattttgttgaatgttcaaaacatccttgagagttaagttagtttgcatattattttctaaaacctgtaaaaatttactgtactcagtgaccatatttaatgacgtcgatttctttaataccgcttgaataattaattgctgtcgtaattgtcggccgaaatctcctcgagcatcttgatgtcgcattcttgagaaagcaagtgcttcccccccatcaagcgttacacttccaacgggaaaatgatgtccactttccgtgaagtccaagtcattatcgaccgtgacccccccgactgcatcaaccaattgttctaagcccttcatattcattaagacatagtaatcaactgggacattaagaaacccttgtaccgtattaatagccattggaataccaccatatgcataggcagcattgattttggcggtttgcccataccccacaattggtactcgtgaatcacgcgcaatacttagcatattggtctgtttcgtctgcggattgacggttgctagaatcatcgtatccgtccgccctttttctgtgcgacctaactcaccagtatctgttcctaataataaaattgaaaatggcgtttttttgttgagtttaaccgcttgattagccttacgtttattctgtgttttacctttagccttgtaaaccgtcttcgctgtttgatcgacatcatagtagaccttcgcagcaaaagcaccgcccgccaaaaccaagatacctaagaccagtagaatgattttccatggagtccatgttttcttatggtgtttatggtgatgatgacgatgtagttctggttcatctgaattcatgtctaactttcctcctcaaggtgtacgatacgagaataataattacattataggttaatcaatgttaaaaagaaatcacttttttgttaacgtcctgttacaacactacttgcggtcctaattactaacgggttttatgattaagtctatcccttacgccgttcaatgaagtcgtaaactttcccccgactggcgtcgacgcgaccgtatccggcctcttcaatcaccacatttaaaacggcgccgaacatcaaaaccatcgccgaataattaagccataacaagagtacaataaaagcaccaattgtcccgtaactattccaagaagtcccaaaatagcgcatatataatgagaaggcttgtgctaataccaaccagccaactgttgttaagaaggcccctggtaatacactgcgcaattgcatctttacattggggacaaagaaataaacaaaaatcagaattacgaataagacaatactggtaatcggccattttaattgtccgaaaacattaatgtaatcttccggtattttgaagattggtgttataaattctagaaattgttgtccgaatgtaaaaacgacgatcaaactgactaataatagtagtaagactaatgtggtccctagagagatgaggcgttttaaaataaaattctgaattttatcgactcgatacgcccgattaatactaattttcaaggcgttgatacccttactagctgcccacaaagttcctaaaatcccgacggatagcaaaccgctatttcgtttgttcaatagcgattgtagtatcggcataatccgattgaaaatcgtcgggggcacagccgattttacataatcagcaacgctgagcacatctaattgaaaatacggcaagatattcccgataacaattagcagtggaaagaatgataacagtgcgtaataggcaattatcttggcgttatcgctgatattggcctctgatgatcgccgaatcatcagtttaatgaaggcaatcaatttctgctttccggaaatatcccgtttaaaaaccggtaattgattttgttcgtctgatttcatatttttcctcataaattcttagtatacgcgctcatgccgggtttcaacaagagcatcaaatgttaaaaaagtaaccatctgtgtatattatacatggttaagtgctagccttatagttttctgaaaacaaaccaagaagccttctcatttttttaagaaggcttcttggtttggtgcttgttttagacgtacactgttttgaaacgtgctttctaaaactgactcctgcgcttagcgacaattcgtaaacaatcgactgcgtcgcttattcacaaatttatgctaatgctcagagtcaatccgttttagacgcactctaattatgctccagccgacatatttctgcgcttaactaaatttgtcaaatcgacgattacatcgtcaattcgccaaattccgttaatgctcaaaatataaccgtcggcttacgcactttatattttacaataaatattttgcatccatttctgggtcttgtgatgttaagatttttggaccgtcttttgtgatggcaattgtgtgttcgtattgtgcacaggctgtgccgtctgctgagacgtagtattcccaatcgtcaccagggactgtcttagccttgatgtgccatgtaccgcctaagatgaccattggttcgatggtgatggtcatcccttctttaaggcgtaatcccttacctgcttcaccgtatgaagggacgttaggttgttcgtgcattgttggttggataccgtgaccgattaattcacgaacatcaccgtagttgttttcaacttcggtatattgttggatggcatggccgatatcacctaagcgattgccaacaactgcttgatcaatcccaaggtataaagccttgcgagtatcatccattaatttttgtaattctggtgcgatttcaccaaccgcataagtccagcaagaatcactttcgtaaccgtctaagttaacggtcatatcgacactgacaatgtcgccttcttttagaattaagttcttccgtggaatggcatgtgccacttcctcattcacgcagacacaagttgcgtacttgtagccttcaaagcctttttcagatgctttggcaccgtgttgttcgatgtagtcgtttgcgaattcttcaattacccagctcgaaatacctggtttgatgatgtcgcgcaaaccgcgatgaacgccggcaataatggcgccagaagcagccatccctttaatttctcgttcagattttaatgtaatcaaaatgaaacctccaataattgttaccaattcactattcgttgaaacggtaaatcgacagcgtgacttgctgtctatcttcaatctcatattatacgctatctgactcaaaagtgtacggccgaccgctttttaattaagattaaacgcaacgccttttcttagttctaggcatttgctataatccatatagcagaatctttattttggtccgtcagttgcgggccatcataccattgcacacgtgaaaggatgttcctaataatggcaacagcaaaagtagtttacgcaagtatgaccggtaataacgaggaaattgccgatatcgttgaagaagctctcgaaaacttagacgtctcggttgaaacgtcagaaatctcacaagcagatccttctgattttgaagacacagacatctgcatcgtctgcagctacacttatggcgacgacggtgatttaccagacgaagccgttgacttctatgaagatttaaaagaaatggatttaaccggtaaggtttacggcgtctgtggttcaggcgataccttctatgatgaattctgcaaagtagtcgacgatttcgccggcgtcttcgaacaaaccggtgccaccaaaggctcagacgtggttaaagttgatctcgcaccagaagcagaagacattgaacacttagaaaaattcgtagcagaaatagtagcaaaacagagtgctctctaagctggtcagcatctgagcactagctacgtctagcaaatagtcaactttgttgcctatttgctagacgtagctaggcacaagatgctaacttagaaagcacatttcaaatcagagtgctttataaagcggtttgactccgagcattagcttaacttggcgaattagcgatgcaatcgctagtttgacaagtgtcgctaagcacaggagtcagctttataaagcacgtttcaagtcagagtggtttataaactgggagcttttgagcattagcttaatcaggcggattagcgatgcaatcgctgatttgactgatgttgctaagcgcagaaagctagtttataaagcacgtttcaagtcagagtgttttggctggcgtttagcttctgagtatagacccggttgccgaatgaatcatgtaatggttcgtttggcaatcgtagctaaacggaagaagttgccagacaaaatacgtttccaccaattcaatatttccccactgggtctagggcaattcccttttgctttgggcccagttttcttattttagttttacattctattattaatttaggggctctttttatggcttttattaagcggctattatttaaataccgagatttattgacctacaccgtttttggctttctagcatcgctcgtcaatatcttcacttactggatctttcgccataccatcatttggccttacttgttagcaaacacggttgcttggttactggcgaatttatttggctttttcaccaataagtccttagtgttccaatctaaatacacaactttcaaggcgctctttggcgaagtgctctcttttttcttcttccgcggcgtttcttttttcttagataacggcttgatgattgtcgctatttcatttttaggttggcaaagcatgacagccaagattgtcgatcaattaatcgtcggtatcgtcaattacattacgacaagctacaccttcaagaaaagtgagcggcagatggccttacgcggtcgtattctgcgccattatcatactattttaaaacgaggcgatcatgattaaaacaattcaaaatctcattcataaatattgggaacaattaatgtatctagtcttcggggtattaacaaccgccgtcaatatggttgttttctaccttttagaccaatatactggtatgtattacttactcagtaataccattgcttggtttttatcagttctatttgcctttttcactaataaaacctgggtttttcagtcaaaatacacgaattttagagatttttcacgtgaaatagctagtttctttttcttccgtggtatatcctatataatggatactgcgataatgtttgtcggtatttcaatgctccatggtcctaacatggtggttaagattatcgatcaatttgtgattatcctggcaaactacattttcagtaaatggattttcaataagtcaacggaggcttaacatgagcaaaacgatttcaattattgtcccctgttttaatgagcaagaatcagtcccactattttatgcagcagttgaaaaagttgcggctcaattaccagatcatgctatcgaatacttatttattaacgatggttccgctgatcaaacgctaccagcaatgcggacattacaagcacaagatccagaacacgtgcattacatctcattttcgagaaacttcggtaaagaagcggcgttatacgccggtttacaagctgcaactggtgattacgtcgccgtaatggatgtcgatctccaagatccccctgctttattacctgaaatgattcaaggtatcgaagttgagggttacgattgtgttggcactcgccggacaactcgtgctggcgaaccacccgttcgttcattcttcgctaaaaagttctatcaaattatcaatcatatttctcaaactaaaattgtggacggtgcgcgtgattaccgtttaatgacccgtcaaatggtcgatgccattcttgaaatgactgaatacaatcgtttttcaaaaggtatcttcagttgggttggtttcgacactaaatatcttgaatatcaaaatcaagatcgcgtcgctggcacaacaagctggtctttctggggactcttcaagtactcacttgatgggattgtcactttctcagaaacaccgctagcaattgcctcatttatcggtttcttctcgtttattatcgcgtcaatcgcgctaatcttcatcattgtccgtgcgattatcttcggtgatccaacaagcggttggccatctctcatctcagttgttctaatgattggtggcttacaactcctttgtttagggattgtcggtaaatacatcggtaagatttatctagaagttaagaaccgcccagtctacattgttaaagaaaagaaataatcaaaagaggcgccacgacaaattctgtcgtagcgcctcttttagtttataacatgttttaaaattcttctggtcgttccttcgtttgttcgaaatgatacgcaattgcgtctaaaatccgctttgaagcaaagccgtcaccgtatgggtttttagcttgcgccatggcatcataaacttcttggttgtctaacaactcaaccattgcatcgtgtaccatttcaggttgtgtgcccactaacttcaaggtcccagcttcaacaccttctggacgttcagttgtgtctctaagcaccaagactggtttaccaagtgatggtgcttcttcttgcacaccacctgaatcagacatgatgaagaaacttctagcggctaagttatggaagtcaaccacatctagtggatcaatcaaatgaatccgtggatggttacctaatatgctttgcgctgcttcttgcacaactgggttaagatgaaccggatagacgatttcaacgtcatcatggctctcaaccacttgacgcatgactttgaagacccgcttcattggttcgccttggttttcacgacgatgcattgtcactagaaccatgcgtttatcagcatccaccacgttcaaaatatcgtgatcatagtcgctttgcaccgtttgtttaagcgcatcaatcgcagtattcccagtaatgaagatattatcttcgttatggttttcttgtaataagttggctttactttgacttgttggtgcaaaataaagatcacttaaaacatcggttaattgacgattcatttcttctgggaatggtgaatacttgtcccaagttctaaggcctgcttcaacgtgcccaatggccgtttgattatagaaggcactgatactagctgcaaacgtggtggtggtatcaccatgcactaagacaatatcaggtttttcagtggcaatcacgtgatcgagattcatcaagacgttacttgtaatctcactcaaggtttgacgctgtttcatgacatctaaatcataatctggtttaattttaaaaatttcaagcacttgatcaagcatctgacgatgttgagcagtgacaacagtgaccgcttcaaactctgtatcgcgctttttaagttccaatacgagtggcgccatcttaatggcttctggtcgggtaccaaaaacggtcattactttaattttagacacaaatagacctcctactacttactattgctatcccttactatgctacacgtttggcgcacgattgacaattattattatcgtttcttaacgacttctttagacccgttccagttcaaaacagcgcattagcatcacaccgatttgcattgaggctgattcttcatcaaattgcactaggtgcgcgttgattaacgtggcaaagcccgtcattgtaatccaaatttcattgactacttgttgttgctgttcttttgtcagacgttggagtggctgataatcatggagccgaatatccgtcacttggttaacaaaagcgcgtgtttcagcagcaccaaaatgattatcaataaataacgcccggtagagttcaggttcaaccgtcgcaaaacgaatatagcccacacctaaattaacaagtgcgtcgtcatgatgctgttcttcactgacataccaaatcaaacgcgccttagcatgttctaagacagcctgtttcaattctgacatactcccgaattcaagataaatcggctgtgttgagcaattcaaagcggttgctaatttacgcgctgtgattgatttcaacccatccgtcaaaacaatttcgtatgctttatcgaggatttgttctgcttttattctttttttacgtgccatgttaccagcacctcccaccacattattgactcaaaaacagattctttaatgccactctaccataaaattaaataacgtgaaaacgtttttatagttggggcgagtttttttaatcatcctatgctatgatattggtatcaaataggctttaaggaggattttttatgacgactttccaacataatcttgaaaaatacgcagcattaatcgctaaaacggggatcaacgtccaagatggcgataccgttgtcatccaaattgcagttagccaagctgaatttgctcgcgacattacggcagcttgttacgatttaggggctgctgaagtaattatcaagtggcaagacgatgccattgatcgcatcaatatgcaacacaaggcgcaagaacgcttggttgacgtgccagacttccaaaaacaagaatacgattactggttagcaaacaatgctaaacggatttcagtgatgtctagtgaccccgataatttgaagggcttagatggcgatcgcgttgctgctgcccaacttgccaatggcaaagcaatgctcaaggtccgccaagccacacaagccaacaagaatagttggatcgttgtagcagctgctagtcctgcctgggcgcataaagtcttccctgatttagaagcccaagaagcaactgataaattatggactgaaatcttcaagacaacccgtgttgaccaaccagatccaattttagcttgggaagaacacggcaagaaattacaagctaaagcagccgaattaaacgctgcccaattcaaagcccttcactatactgcccctggcactgatttaacaatcggcttacctgaaaaccatatttggattggtggtcctaaccaaagtagcgatggtcgcccattcgttgccaacatgccaactgaagaagtcttctcagcagctgatgccaaccatattgacggttatatttcatccactaaaccattaagctatgctggtaacactttgaataacatgcaattcaccttcgaaaacggccgcgtgattaaagccactgctgaagaaggcaacgatgttcttcaaaaactattacaaacggacgaaggggttaagagtttaggcgaagtcgccttagtaccagatccttcaccaatctcacaatcaaagatcaccttctacaatacgttattcgacgaaaatgcgtcaaatcatttggctctaggctcagcttacgccttttcaattaaaggtggcactgacatgacacaagaagaattaaaagcagctggcttaaatcgtagccaagcacacgttgatttcatggttggttcaagtgatatgaatatcgatggtttaacacatgatggtcaaatcgtaccagtcttcagaaacggtgactgggctaactaatgctaactttttggcttatgctgttaggtatttcgatttgcctaacaaccttttttgtcggtttaaccgcttattactattttcaaaaacaaaccactaagttattagtggtcatctcgttaattgggattatctgtacagtcgtcacttattactacttccatcaggccctattaacaccagctttataattaaacaaggattggtcccaaattcatatttggccccaatcctttttattttccttattaacacctgtacttaataaccattcgaatctaacctagcaattgatttgacacgattctttcgttgtgaaggatttcccaaaagtcattgataatctttctcaattagctataatgaagttaaatcagtcaatattaaggagacatcgctcatgaaagctatcacaaccaccaacgctaaacccttagaacatcactttcatctatcagaacgactcaacatcattcgggccggtgttctaggtgccaatgacggcattatttcggttgctgggattgtggtcggtgttgctagcgcgcaccaaagtcaatacaccctcttcttagctgggatttctggcatgttagcgggcgccttttcgatgggcggcggtgaatacgtctcggtcagcacacaacgtgatacgcaaaaatcaatgatgcgccttcaaaaagaagcgattcaaaacgaatacgatgccgaagtagctagtctacaacgaacctatgaatcaaagggcttaccaacgcccctcgctaaccaagttgcgacagccttcatgcaaaaggatagtcttgatattacgctccgcgaaaaatataacattgaactacaccactattttaatccctggcacgcagccttttcatccttcttctcgttcattttgggttcgctcttaccaatcctcacaattctagcgattccttatccttacaaagtcagtgggaccgtggcgtcaattgttgttgccttaatcattaccggctatacaagtgccacgttaggtcatgccaaccacttcaaaggcgttttacgcaacgtcttaactggggtcttaacaatggtcgtcacttacttaatcggcggttcgattggttagccttttctttgctaaccaaatttgctatgataggtttaatttaatcgttgccaccgggcagttaatcacttctataggtcttagaagaagtgattgactgcctttttttgtggcgcgacaacattaggaggctttatattatggcatggtttgatttattaatcgcaggattagcggaagtttggtgggcaaccaccatgaagatgagtagcggctttaccaagctcaactacacgttattaacgattgtcgggatggtggttagctttggctttttaattcgcgccaccaaaggattaccgcttagcatcgcttaccccgtttggaccgggattggtgccgttggggcgattttagtcggtgtgattttattcaatgaacatcttagtttgttaacttggttattcgtgattttactcgtgattgggattatcggaattaaagtgacaagcggtcattaaacaaaaataagcttgcccactgtggggaagcttatttttgtgcttgtgctaactgccaacgtgcaatattttggatgagctcaactggaaatgccgcactatcttttttaaattgcagcgtccctttacccgtttgataaggcgcgacttcttttgcaaaatgagccatcggttgattcgttggatagaaaccaacatggcgcttgttaatgccaaaataacaaagtgccttaggttggtagtagccaactaatccgtaggccaatttaacttcggcatccggcaacgccgtacaaataatcttgtgcattgacagtgcaagctcacgatcacgttcattttctaaaccagccaaatattgtgtcacattatccattttagccccacctctattttgctatcatcttaacacaagccttcaaaaaaatgccaataaaaaaagcccaaccgaagttggacttttttgataaataataattatttaacagctggtgtaccgaaccattcgatacgtgattcaactgtgtctttgattgcttttgtaccaggtgcaagaactttacgaggatcaaagcctttttcagcttcgtctttgtctgcagcgtagtatgctttaacagcttttgaccatgcaatttgttgttctgtattaacgttaaccttagcaatacccatgtcgattgctttaaggatttgttccttaggaatacctgaaccaccgtgtaatacaagaggaatcttgatttcagcagctaattcttctaaacggtcaaagcttaaaccttgccagttttcagggtatacaccgtgaatgttaccaataccaacagctaagtagtcaggaccagcagctgctaattgtttagcttcttcaacatcagctaattcaccagcaccaacgataccgtcttcttcgccaccaattgaaccaacttcggcttcaactgagatacctttagcatgtgctaaagcaacgatttcttttgtctttgctaagttttcttcgaatggtaaatcatgaccatcgaacataactgagttgtaaccaacttcgatacattctttagcagcttcgtagttaccgtgatctaaatgcatgataacaggaacagtgatgttcattgacttgattgtttgttcaaccaagttcttgcataattcgtaaccacccatatatttagcagcacccattgatgtttggatcaagattggtgtgttagtttcttgagcagcgcctaagatagcacgtgtccattcaaggttgtttgtgttgaaagcaccaacagcgtaatgaccttcacgagcagctttaaagatttctgtaccattaactaatgacatgaaaaagcctccagattaattgcaactttttagttgcgatttttgaatacgagtctattttaccatatttttgctgaatatgaatcacctttgacaactttctgaaaatgaaaacgaattcaatctttcaacccaattctgactggttttgtgcttaattatcaaatgaaaaaataaataacgacaataataacaccccatagtaatagtgatattggcagcccataaattagccctttaaacaatgatttcccctctttaacgtccgtattgacgcaaaaagaagaaaatttagcgtcattagcgctaaactttcttcttctacttgttgttgctatttaatttaagatgcccccggcgagaatcgaactcgcaacctatcgcttaggaggcgattgctctatccagttgagccacgagagcctataactttcattatcgcacctcgtgaattaactgtaaagttgatttagcaatattcagtcgacatctgtcattttttgatgcatcgtttcaactccgaataagaggacggctccggctgccatcaaaatcgcaaccgtgaagatcgtaaaaatcactgtgattgagactttttgattgatgagatagccgactaaaaacggtccgacaatcccaccaatccgcccaactgcagctgctaacccactaccgctaccacgaataatggctggatattgttccggtgtgtaggcataaagcgcgccccacgcacccaagttgaaaaaggataacaaggcgccggcactaattaatagggcgacggactgagcggtaccaaagaaataggcgctgattgccgttccgattaagaaactgccaagaacccatttacgaccccatttttcgattaaccaagcggccgaaaaatagccgggtagctgcgccaaagtcatgattaagacgtaaccaaaactgttgaccaaactaaaacctttgagcaccatgacacttggtaaccagaggaacattccgtaataagaaaagacgactaagaaccacacaaaccataataaagccgttttttggcggtaagctggttgccacaatttcgtaacgcgctgcataaagggcaacggcttttgaatcgtggctggttcgtggctatccttgacgtgctcccgaaggaccaacgtgtaaacagcggggagtgacgtaatcaataagacaacgcgccaaccccaattaggaatcacaaaatatgccagtaaactagccgctaaccaaccggccgcccagaaactctctagtaagacgactgcccgcccacgtgttgcgtccggtgtattctctgaaattaacgtcgaagcaactggtaactcgccacccaaaccgatacccactaataaccgtaaggccatgaagacgattaatgatgggctaagcgccgataagccgttcccaattgaaaaaagtaatagcgagaatagtaaactattccgccgcccaattttatcagccaaggcgccgaagaagacagcaccaatcgccatcccgattgagccaacactgccaattaaacccatttgaccactgttaaggtgccattctttagcgagggccgcgattacaaacgatagtaagcccacgtccatcgcatcaaacagccaggccccaccagctgcccataatagtttgtgatgttcttttgtcatctcaaatccgcctccaaagttgataataattgtgtttatcatacttcttaggtttacaggtgtcaagacaccctaattattaacgtagagaatatcaagtgctgacaaggccgcttttatccgttcaaaatcctgttcagaagcgcattcgatggtgtggaggtgaatcccaccagtgagtgttgagagtagtttttgttcgggatattttttaattttttgcataaatcctttgacatctgtcaagttgttgatgcctaattgccccgttatttcgccgtagacttgatgatcaactgtaacgtcaatcactcgcccgccgttttgaacaatggcggttaattcagcgcgcgtcttggcttgtgtatgctgacacactaattgtgcgcgataaccggtgatttgttgggttgtcgtttgataataatagccgctgaccgtcgcaataatattgacaccctgcgcgcgaattaacgcaatatcgcccacaattgtctggcgactcacgtgataagtctgcgctagttgcttggcactaatcggttggccactgtctttaatcgccgctaaaatggcgtctcttctttgttgggttgtcattaccacacctcgttttatctaatacagctattttaagcgcaatcgcacaaaaaaggaagtgcgtttgaaacgggttggcttcgagcattagcaccgctcggcgaataactgctgcaagcagttgtttgacgagtgacgctaagcacagaaagctactgacaaaaaacggtaaaaccatccatatccgaatatcaaaaaagacctaggacaaaaatcacttttgtcctaggtcttcatttttttaatttaattgttgtccgttacttcgaatgacgcgttggtaccaataaaagctgtccttaggatagcgattgagttccttttcgtcggtttcatctcgatcaacatagacaaaaccgtagcgcttctgataaccattcgtccaactcaataaatccgtgaaactccaggttgtgtaaccaatgacggtcacgccatctgtaatggcttcttggattgcttgaatgtgagcctttaaaaaggcaatgcggtaatcatcgtgcacttcaccagcaccatctaggcgatcataagcacccaaaccattttcggtaattaaaaccggtaagctataacgactctcaatgcgccgtaatgccattctaagtccttctgggtcaatattccaatcccagtcggtttgttgcatatacggattgtcagccgtcttgaaaagccctggcacaccgctcgcttgactcgttccttttttaccggaagtattttgtttggttaacccaacgccaccgaccaacggattagccgttacggttgtcgtttggtaatagttgagtcccatgaaatcaggccgggctaatgggtcttgtagtaatgcttgatctgctgccgtgatatctggcagcagtccttcacgcgcccaataatttagaattaacttcggatagcgaccccaagcataaacatccaaccataaatcggcattcaattgctcagcatcatcagccgcaatctggttcactggatcagcatctagggcataggttggactataggcaaaactaggaccaatcccaccttgataacctttttcgtggaacaacttaatagcactcgcattggctaaattggccatatgattggcttggtaagtccgtttagcatccatcactgctggtggatgttctgcggttaaatagccgtgcgtgatgaagatattttgttcgttcaaggttacccagtgacgcacacgatcgccaaaacgttcgaataataaggctgcataagctgtaaaatccggaataatctgccgagattcccaaccaccatattcctcttgcaaggcttggggtaagtcccaatgataaattgtaacaatcggttcgatctgattagcaattaattcatcgattaagcgatcataaaaggccaacccctcttcattcacagtgcctcgcccgtcaggcaatacccgtggccacgaaattgagaagcgataggctttcaagccagctcgggccatcaacgcgacatcttctcgataacgatgatagtgatcaaccgcgacatccccattagtttccttgaaggtcttcccaggaatacgaacaaactggtcccagacagactgacccttacccgcttcttgataagccccttcaatctgataggccgccgaagctgaaccccatagaaaatcttgtgggaatggtgctaattgttgatattccataatcaaactctctccttatcccgctagatatgacttttcaatttgcttcaacatttttttgaagccccgttttctcataaagcctaaaacggcacccatcaataaatcatttgtttgttgtaatttactgtttgccttggcttgttcccggtaaatcacttggattgcttgggggccattggcaaaaatatcataactcgattggtaagtccctcgtgatgaggttgtttcgtagtgatagctctgatccttgatcaattgagtgaccttcagcattgctttaccacgattaccaaacgatttttgatacgaataattagcaagttgcgcttcggtaattttttcgccggtttgttgtttgatatcaaataaaacagacgtcataatcttctgatagaaatcactcgcaggcatactcaaattttgtttaatttccataacgcaatcacgctctttctctaactttagtacgtttcaacaggtaaaccagccatcttacgatagacatcaacaacttcgccggcaaggtctctgaacgtaatagcgttcattaaatgatcttgagaatgaacggttagtaaagtgacatcaatatggtcgccactggcttccttagttaacatccctgtttggacattgtgtgcttctgataatgcagcgtctgattcttgtaatttagcagcagcttggtcaaagtcacccttcttagcggcctgaattgcttccattgcactacttttggcgttcccaccattaataatcaatcccatgattgtttctaagttttgttcatctgccattgtcggcacctcctaaaatttagctcgtcactgactttcacgtttgcctctagttgttccaaggccgttagcgataactgaggtctaacgtggtcttgtccaatttagataaaaggcttacaaattaaaaatcaatttccagcgagtccgttcgctcaagtgtccgtcaaacgaaataaaacccttacttgcattgtaaacgcttaactaaaattgtcaataaatagcttgcccactccctcacaatgccgaccaaataaaaaagaaacctcaactaaattaaggtttcttctctgtttgggctagaccgttaaatctttgtttttcttgtgatagcccttattcttttgatcgcgtttacgatttttcttacgttttggctttaatggttcagcaggttggcgagttggcactggtttcttagccacttttgtcttacttcgttcacccattggtttgtcatcagcaaccggtgttttcgttggttgttgcgttggtgtggcagcatttttttgaactggtgcggcttccttcacaactgctggttttgtttcttccaaatgatcgccgaccaaataacgggtcactaaatcatattctggcgctaacaatttccgcaagttacggccatcatgttggttccccaacgttaataccgttccttcacggcccatccgaccagtccgaccagcccgatgaatataggtaatcttagcattaggcacgtcaaagttaatgacatatggtaagtcagtaatatctaagccccgcccagcaacatctgtcgctaaaagcagttgaatcttaccttcacggaagtcttttaacgccttttgccgttctgtttggcgtccttggccggataaagcagcatatgttaccttttggtgtttcaaggtttgagctgcttgtagtaattgggcagattggttgaaaattaccaagcctctaaaattcttttggtgcgctaaatgccgtaagacattcactttttgcgcgttaccagttggaatgaaggcgtgtaatacgtccccaccagttttgtcgattgaccgcacatcaattgtttcgattgggaccccaaaccaagtttctaaatcggttaatgtgtccgttgaagttgctgagaagaagcccaattgcacatcagctggtgattcttgcacaatgtggcgggtttctgataagccactgtccgttaataattcatccgcttcatccatgataatggcttgtagcgtatggaattttatcttgcgttgttcgctgagttccaataaacggccagtggttgcaacgataatttctggtttcgtctttaatcgttcaatttggcgcttaacattagctttcccagtaatcgcttggacgttacagtcaatcgccttggcataaggttgaatgacatctcgtgtttgaatgacgagttcttgtgaaggggccaagattaagacttggagaccttcaccgggcataatcttttctaataaggggagcgaaaatgcaagtgtcttccctgaaccggttggggctaagcctaaaattgatttatcctgttttaaaggttggtaaactgcttcttgaattggggaaaggtccttaaacccttgttcatcccatagtgcttgaaataatggtgaaacgctcatgtattgcctccgttaatgttgatctgcatcaaactggatcccggccgattgtcttaattgatataaaacggcattgaccgattgacttagttgtaataattcatgataccgttttgtgtcgtgattagcaataatcgttgcaaaagttgccgcttcagccatcatcggattagcaagtgattgttcgccgagagatgttattttttgaccaccatcttcgtataaatcgacttgaccaattgtgcccgcattatctaagacaattgtgctttggccgccataaatttctgatgttaaatatgaatccactgtcttaccaaagattaaagtcacatcgtaatctgggtaatgaagggttgcgacccctttaccatccaccttagttggtagcatttcagcttggtaatcaaccgtaatgggttggccaaaccagctgagtgcatcgtaaacaacataaacgcctaaatcttgtaaggccccacctgaaaaatgaggtgagaaaatattaggttcttcacctgctaaaacggcatcatagcgagatgagtatttcatatacgacaaagttgccccgttgatacttggcaatttggcaatcgcgtcttgcacaattttgaaattagcttcatgaatttggcgggcggcctcaaataagaactgatcgggatgatccgctaataaggcaatcatatctgccatttcatccggattactgaaagccggcttttcgacaatcacatttttaccggcttcaattgcttgtttggcttgtttaaaatgtaaactgttgggggatgcaatataaacggtttcaaaatcccggcttccaaaaaagccagtgagggttgtatacgtatttgcttcaggggcagtatagtctgttttaaattgctctgccttttcttcagttcttgaataaaccgctgtcaattcgaacgcttctgcctcacgtgcagcattcacaaattgtcctgtaatccagtttgtaccaataatgcctaatttttgcatgtcagtcaactccttcaattaatagttttagtatacgggttttcgttagaaaaacctattaaaatcaactactagttagtggcctcaattaagcattttaataaataatcgcgttctttaataattcttaataaaatccgccttaagaccgataattaattgcacgcaaggcacgtaattcgtgctaaaatagagagtaattgaggtgtgactatgcgaatttttgaatttaaaaaaccacgagaattatttgatcaaacgattcatcaatatcaacaaaaggcccggtccactcaagccagtaaaacagcaactttttacgcgggtcattggactttcgatgatgaaaaaacgcataaacgacatacgcttgaaatcacgccaaacttactcatccagattgatcacaaaccactaactggcaaagtaattttattaagtgaaaccgagcttatttttctcgaccattttggttaccaactcaaaattacatgtgaaaaccaccaaccggtttcaatctacgacgaagcagaagacacggaatacccaatcaaataaagagtgctcttttcaaccgttttgattctgagcattaactgagcgtgctgaatgaccgatgaaatcggtcgtttagtacgcgtggttaagcacaagaggcagtgaataaaagccaatccatacataaagaagccgcccaaaataatttgggcgacttctttttttacctatttaattgtttagccaatgccttttcggctgcttttggtaaatcagctttgtctaccttttgccatgacatcacacctttgcgatcgttaacctttaattcaaggtaggcttgtttttgtaagcgtgaacttttagcactattaaagctcacctttttttgatggccagcctgatcgtatgcgggcaggtcgtattggtaagaaacatatgatttaccttctgtgtccttatcgacctgcttcgtgccgtcagttgtaatttgtgtgtaataggtttcaccaccgtaataatattccttaattccccagctgccgccaataaagaaaatcacgatgatgattaataataaccagcctttgcgtttaaacatatttaggctccatttctatttaagtttttgccattcttgcggcgtaccggtgaaaaccgccaattgatattctgagtcgtctcggccaccaggtattttgctggcagtggtatactgccaaaaaccgttcttagtgccaactgttggccgttgttgcgttgtttgccacagtggataagtgcccttggttgggacatagcgcttcaataatgccggcgcaccaccgatgatacaatcttggtgataatactgattaacgagcgtcacaaaccgggcaattgcccgttgcgtcttggcttttgccggtggtttttgtgcgtaatcattgtaataggaaagataaaccataattggtagatgtccggtatcttgcccgactgatttgataaattgttgcgcctggtcttcaggtgagctatcaaaactaaaaaagtgataaacccccactgacatacccgagccctctgcccgactgtaattactatcgaaattatcatccttataggaagccccttcggtcgcttttagataaacgaattttaggctttcttttttcaaaatctgataatcttggtagccatcttcttggctaatttgagcccctaagacgggatattgttgctcgttaggccggtcggttcgattctggagccaccaccaaataccggtgatcactgcaatcgctaagaggcttagtaaaactattcggcgccagtagcgcttttgaaaactatcttgaaaaatcggcgtcattcgacgtttcatcgtttcaccccaacttaagcttaatacgcttagtttactattttcattaactgcaaacaagcgacctaacaattttgttcgtcgttgtcacttttgtttgccttttcacttgaatggtctacaatatgttcaaaggaggcggattatgctagatgagcgtttactggggttaacattccagctgcccgatgcacaatcggcgggcgtgatttcttttttcggcgtcttatatcattaccgtgttgcgggaccagcggaaactggtctactggttgtcgtcactgatgtatcaccattatacttaacagttacggcccaacacaatgttttagaatactagttttactttggagaggaagtttttagtatgggtatttttctaacgattttattaattgtcattttagttttaattgccatcactttattctcatcttttgccttgatccatactggtgaagtgggcattttagaacgacttggggtttacgtgaagaccttggaacctggtttccaccttgtcttcccatttttataccacatcactgaagtagttaacatgaaacaaattccgttaaaagtagcggaacaagaagttatcactaaggataacgttgtggtcatgatttcagaaacacttaaataccacatcacagacgttaattcatatgtttacaagaataaggattctgttttgagtatggtacaagatactcgggcccaactgcgtgggattatcgggaatatggatttaaacgatgttttaaacgggacagaacaaattaatcacaccctttttgaacaattgagtgctgtgaccgccggctacggtttaaatgttgatcgggtcaatatcgattccattcaagtcgcacatgatattcaagaatcaatgaacaaattactccgtgcttctcgtgaaaaagaagccaatattatggaagctgaagggctcaaagccgctgccatccgtaaggctgaaggggttaaggaagccaatattctagaagccgaagctaacaagcaaacccaaatcttggaagctgaagggaaagcgcaaagtcaaagaaccgtcgctgaagcggttaaggatcaaattaacttaatcaactctagtttggtgaataacggcgaactttacttgcaattcaagaacatcgaagcaatggaacacgttgccgatggccaaaataacaccatcgtgctccctaacaaagcaattgacagcttaggtagcctcccagcagttggcgaattattagcaaataaagacaagcatctataacatacaaaagaagcggcggacaatatatttgtccgccgcttctttttggtatccgaataattatcgttttaacgtgttctataagttacacttctttttttagtgctcttgctcgtcatccgaattggcccccgcttttggcggttgattcattcgattggtcgtcttgcttaaaatatattgctcgagtagattgataatctgctggttctgcggtaaatcggagtgttgcgcttgatccccggtaaccgtgatttccgtataatgcttgacttgaccctgataaatatacttaccagcctcaacactacgagccggcacaatcccatcattttcgaagttctcagtccccgcgatggaatacatcgacaagttcgagggaatcttcttccgattggcgataaaatccgttaacatttgcgatttatgggccagcgacgtttcttcgaaattatagggtgagccaatcgtcattaattttttaacggtaatgtcatcccgattgaagtaattctctaaaaaggcggtgtagatcaaaccaccgttcgaatgcccgactgctttaaaattattaaactggtatttcttggctaacgccgtaaacgcgattgagaaccatttagcctgtttcttgatattactgtagccatctttgttattttcaaagccaaccacgataaaaggttcgttatcccgcggcttaatttcgccagaataactgatgtgattattggtatccacggttagtttcaataaactatgcttattgccccgctttttattcagtttggtaaccaactcatcaaaacgattctgagtcgcgctactcccaggaatgaagatcaccggagacattttagaatcatggcgtttagttaaagttgcgacgttttggcgcgtccattgtgcagaaggccacatcatcgcgcctaaaaatagaaaactcaagccaaggagaattaaacttttacgttgtaatttagacatcttggtcaactccttcctgcaaacgatttgcaagttggatgaatggtttataaattaaaacgccgacgaacacgtttagcaaactaatcaccaatgccatccagttaccgttagtcccaataaacgcctgtagcaaccccggcgttcccagtggcacgttataaaccaccgccggcatcaaattgagtgcaatcgccagggccgcaatccccatattaaccagtggcaccagcagaaacgggataatgtataacccatttcctaagactggtagtccggttaaaacggcactgttgaaattaaagaggaccggcatcaacgaccagcggccaatcaaatgctgatcacgctgacgactgaaaagaaaaatagcgattactaaagccaaggtgccaccagtcccaccaatggccccaaatggtccgtaaagtgttcctaacgtgaacggataaggtacgtgccatggtgtatggtgcaagaaggcgtaatttaggttagccgttgcggaaaacccatcacggccaaactgctcaagcgttggcatgctggttaacccaaagaatgtcaagattgtaacgagtaccccaattccgagtgaaaaaatcaaactcgtttgattggcttttaaattctgtaattttaagatgacttgatccggtagaattgaaatttccaaccagttgagtaacaaccccactaaaattgcagtgacgaccactaagctaattggcactaacgaatccaatgaacgccccacaattgacccgttattcggattagcaacctgttgcgctttccctagccatctgaaaacaagacctaccagataaccgacgagtaagccgaagaagagcgcccccatccccaacaaattcgcattaaacgtcaattcaccgttgggcgtataccgcaaggctaataaaagataggccactaagcctgtgatgcttgccagttgttcgtcccgaccataatacttggccgtatagcgcgctgttgcaaaagctgcgattgctgccacaatccctaaggttaaactcgttagactattaaacggcacctgcatataattatgcttcgttaaccaagttgaaaagtgaaaaatactggcgataaaactatggcgattaaataatgtcagttgaattaattggcttaaactaccgattaacacaaacggaaacaacaacgttaaactcctttgaataatttgatacaatggatgattggtttgaacccgcgtgatccattgcccaaataacagtaatttagattgaacgattactttcatctgttaaccctcttatcatttctcttattggctttattctagccgaaacgattctattttgcacgcctttcttccctagaccactaaaaaggccgtctaaccctcgatgatgaggattaaacggcctttttagtggtctttaaagctgattcttgtgtttaacagataatcggctgatgtcgcactctattttagtactaattttgttactgattcgacgtgtaatgtttgtgggaacatgtccactggttgtgtgccttctgcttggtaaccttgtgcggctaacaagtctaagtcacgtgccaatgttgctgggttacagctgacataaaccatcttagcaggtttcaattgaccaacagcttcgataaagcttggttccaagcctttacgtggtggatcaacgattaaagcatcgacttgaaggccgtctgtttgccattgggccatcacatcttcggctttgccgagtgtgaattcaacgttatcaatcgcattgattttagcattatgacgggcatccatgacagctgattcaacgacttcaacgccgtaaacttgcttagcatgtttagccactgctaatgagattgtcccgatacctgaataagcatcgatcactgtttcattgcctgttaattcagctgcttcaattgccttttggtaaaggacttcagtttgcactgggttcacttgatagaatgattgtgctgaaatttcaaatttcaagcccattaattcatcacgaataaagtcacggccagcgattaattttgtttgatcaccgaaaatgacgtttgtttgggctgcattaacgttttgcatgatgctgaccacttctggaagagccttcttgatttcgatggcaatttcacgggcagccggtaatttcttactacgtgtgatgaagacaatcatcatttcgtggctgtaataaccgcgacgaaccatgattgttctcaaaacacccttatgcgtatcttcattgtatggatcaatgtagaaacgacgtaagatatcacgaaccactttgattgcttcatcaatcttaggatcttggatgtagaaatcttccattggcatcacttggtgactgtgtttccggtagaaaccggtcattaaggcaccatcgataaaccgaacaggtacttgagccttgttacggtaaccagttggatcagtcatcccaagtgtaggttggactggaatatccaaatgcgctttttggaaaacatttaagatttgattgcgtttaaacgttaattgcgctgggtatgccaagtgttgaagtggtgcgatcccagtttgtgagtagatattagcttttgattcaacacgatctgggcttttctttaataagttaaccaaacgtgcgaaaccgtattgtttgttgacctttgtgacttctacttcggcttgttcatcaggtaaaacaccttcgatgaataatgggtaattgtcaactttggcaacacccatgccttcataggtcaaatccataatatcgaccgttaacttttcattttttcttactggtgcttgaattttcatagtaacctcttttttgttgtttaaaaagagtctgaaacaaaactgagttttgcgccggactcttttcgcctaatagtttagtttaacctattttaccgtcaccgtcgatatcttcttttgatatttcttcgacttctttgacgaattgatcttctgctgcaagctcttctggtgtctccgttgtgattgcgtgatctggaatggcctctttattaacgtacatttcgatgtgttgttgtaagttaataaaagtcattggcgcatcgccaccgtattcaccatctagattaatcatcatcttgtcgttttcgtcagctggtcgagccactaacttagacgtcttcgtataaataatccgtggatcatcaacgtgcttgccaccttttaggacaagtgccatcagatgaaccaattcggccatattagccgtcttcacgacgattaatgaaaaattaccgtcatccagttgggcatctggcgccacctgttcgaacccaccgacagaattcgtcaagcctaataagaagagtgatgcttgaccatcataagtcccttcatcgtattcaagatgcatttgaatgggcttaatctgaggcaacatttctgcgcctttgacgatatacgctaaataaccaaagattgatttgaaatcagaaggtacttcatacgtcaactctgtcaacaagccgcccccggcgatgttcataaaataattatcgtttgcttgaccgatatccattttgagcgtttgattttttaaaatcactttcgctgcatcgactggattgtcacgtggaatcttcaaagcgcgcgcgtaatcatttgttgtcccggcaggaataattgccattttagggcgtttagccagtccggcaatcccgttgaccacttcgttgatcgtgccatcaccgccggcggcaaccactaaatcaaaattatctttagcagcacgtgtcgcttctttttgcgcagatgctggttcaggtgttgtttgataagcgctcgcttcataacccgcttgttctaaaatatccagaatatcagcaacacttcgcttcattacttcatgtcctgaagttggattataaattaaccgtgcacgtttttgcatatgaatctcctaattctcgattatcgtttatttaattcagccatcaataaatcattaacaactttcggattagcttgaccgcgtgtttccttcataatcttaccgactaagaagccaactgcccggtctttaccatttttgaaatcgtcaattgattgttgattatcatcaaggatccctgtgatgattggtgtcaacttagcagggtctgataattgaaccatccctttagcttcaacccacgcttttggatccgtatcattttggataatttcttggaagacctttttagcaatcttcgatgaaataataccgtctttgatcaagttgatcatttgagctaaatgttctggtgttaatgcggtttcttgaaggtcaatttgcttgtcgttcaagtaagcattcacttcgcccatcaaccagttagaaacttgtttaggtgcggcaccgttggcaacagctgcttcaaagaagtcagacatttccttcgtgttcgttaagacacccgcatcatattctggtaagcctaattcatcaacataccgtgtccggcgtttagcaggcatttcaggcatattgtcttgcacttctttcaaccagtcatcgccaatgtgcattggtggtagatctggttctgggaagtaacggtaatcatccgcaccagatttaacccgcattaagtaggtttcgcctgatttttcatcaaaacgacgagtttctggacgaattgtttcaccagcaatcaagagttgtgattgacgcttgatttcataagccaaccctaaacggacatggttaaatgagttcaagtttttcaattctgatttaacaccatatttcttagcgccgattggtcgcacagaaatattggtatccacccgcattgacccttcttccatcttaacatcagatgcgcccgtaaattgaacgatttgacgtaaggtttcaaggtaagcataggcttcttcaggtgttgacatatcaggttttgagacgatttcgatcaaggctgttccttgacggtttaaatcgacgtatgaatagccgtctgaaccatgcgtattcttaccagcatcttcttcgacgtgcaattcagcaatcccgatttgttttttgtgaccatcaatctcgacttcaatataaccgtctttaccaaggggttgttcgtattgtgtgatttgataagcctttggattatctgggtagaaataatttttccggtcaaaatgtgtatcacgggcaatatcagcatgtagtgctgttgcgaccatcatcccaagcgtgtaagcacccttgttcaaagttggcaatgtcccaggataaccccagtcgataacattcgtgttggtattaggttctgcaccataattaacaggagatggactgtacatttttgagttggtttttaattcaatatgcacttcaagtccgattgttgtttcgaaattcattaggcttgtcctcctttaaagcttggtacgtttttgttaaattctgtggcttgttcaaaggcgtaaccggcacgataaactgattcttcgtcgaaggctttcccgatgatttgtaaaccaactggcatcccatcaacaagaccagcaggtactgacattgctggtaagccagccatgttagcaggaatcgttaagatatcattcatgtacattgtgacaggatccgtgcccttgtcacctaacttgaaggcagttgttggtgttgtaggacccacaactaaatcgtaatcttcgaagaccttttcgaaatcttgaataatcaaggtccgcatttgacccgcttttttgaagtaagcatcatagaaacctgatgataaagcaaatgtgccaagcataatccggcgtttcacttcatcgccaaagccttcagaacgtgatttaacgtaaacatcttcaagcgtcttagcttcaggtgaacggtagccgtaacgaatcccgtcaaaacgtgacaagttagatgaggcttcacttgaagcaatgatgtagtaagtttgaaccgcatattgagaatgtggcaagctaacttcttcaaccgttgcacccaatgacttgaaagtttcgatagctgtttcgatttgggccttaacagctggttcaacaccttctgccatatattctttggcaacggcaatcttcatgcccttgatgtcgccgtttaaagcagcccggaaatcaggtacgtcataatcagcactggtactgtctttttcatcatgaccactgatggcttgtaaaacagttgcgttatcagcaacagttcgactgaagacaccgacttgatcaagacttgaagcaaaagcaatcgcaccccaacgtgacacacggccataagttggtttgataccgacaatcccgttaaaagcagcgggttggcgaattgaaccaccagtatctgtccctaaagcagcgaccacttcacccgcggcaacagctgctgctgaaccacctgaagaaccgccaggcactttatcaaggtcccaagggtttttagtcttcttaaaggcagatgtttctgttgaagaacccatggcaaattcatctaagttggttttaccaatcatgatggcctttttagcctttaatttttcaacaacagtcgcatcaaaaacgggtttgaagttagcaagcatcttgctagcagctgtcgttgtgacaccgtctgtcaataagttatctttaatcccaattggcatcccggctaataagttatcagcatcgattggttgcgcatcgattttggcagctgcttcttgagcgcctttttcatcgattgttaagaaagcatcaacttgttgttctttggttttaatcgtttctaatgtatccgttactaattgactagccgttaagtcaccagcaactagtttgtcatgaacactttgtaaatcttcgtttaaataatccacggttaggcttcctccttgtccatgatggcagggactttcaataagccgtctgctgaatctggtgcattcttcattaagatttcacgatctgtccctggttgggcaacatcttcgcgaacaatgttcttgaggccatttacatgagtcgttacgggaacacctgtggtatccacttcgtttaattcatcagtcattttcatgatgtcggcaagttgttcagtgaattgttctaattgttcatcactgaaagctaatttggaaagttctgcgacatgctgaacttgttttttatcaatcatgagtaaaccccttttctaattcagtcactatttatccattctgattaattttaccatatattgccctagatgaaagtgacatcccccggaatttggtcgttttctataacttattcatgtaatcgttaccattagttgctatctcaaactttttaccctaattagttttatcattactggtaacaatatatcttatacaactcattaggactcgatatgattcataacaatgaacggtagacaaccatacgttcaaacttatataattgactagacaaatacgttagaagaaataatcatttaaccattattacaaggaggaacttattatgaccattacatcatttactcgttttttagccgttgctagccttagcctattcgccggactaacaattcaacatcaatccgtttcagctgctacttctactgtcggtgttactttctcaggcatcaccccagaaatgcaagcaaaagctgcagaagaacgggcggctgaagaagaggtgaatgatgcttggctagatatggacttcaccgacgattctcctgttgaagttgaagaaactgtcaacggtcaaacacagcactattgggaatatgctgatggcacaacaagccaaacagcacctgccgaaacagctgatactgaagacgttgcaacaacaacccaaacagctgctcagcctactgcagaagcagcacctgccgttagcgaacaacaaacaccagaagcagcaactactactactaaacaaacagcaacacctgttaaaaaagcacaacctaaaaaagaaaagttcaaaccaatgccaagtgttgcaacgattaagcaactcacatttgactgggcttcagcacaagtgatgcaacccctagaaaaaatgatcgcacatgctatcaaaggcctataattaaaaaaagctcccggcaatcaactgattgccgggagctttttgaatctcttatttaataactaccgaaaacgtgtgtggtaaagcctttgctgcctgatgcacgcccaacataggcttgcatcccttccgccgatgtaattgagatatcaagcggaatgttacgcggtaaatacttatccgcggccgtcgcaatatactgtgtaaaactcataatttccgtttcactgtagaattgcgtattaaccgtgatattcatgcctgctaagacgccttcttcataatgcgtctgagcggtcacaccacttaagttcgggaagaacgtttcaacttgtgttttaaaactgttaaaagctgtcgcgtcgtcttgattaattgctttttcatcatttaccactggtagcacttgattttcttgattcaattcgtgccatgaatcaatcgttgtgctgccttttttgctgaccccataagcgaagaatgtgccaccaactaaactatccttaggggcttgtttataaagtccaatgacaattgtcgtatcgctgaggcccttcttttgacgcattcggcttaaaaccttattagccatttgtttgccttgttgggtcatcattgcttttgaaatcttcgtttcaaacgttgcaccgtattgttccttggtataataatcaacttgattcatccctaggccaatactcatgcccttcatactgccatcttcgcctaaataatcttgttccaatatctgttgaaggtaaattggattccgtttatttggatctttttgaccattatcctcggggtttaagccctctgtattcgtttttgatttacgtgctaaccatttttgcgcttgagcggtctttaaactttgcccttcttggaaaacatattttgaagttggaaattgttctttggatagtttaagaagcccactctcaagactcttaacatcaaaagaggtattactctgttgcgttgttaatcctcgagtctgactagttttatactgaccattatcaattacgccttcatacatactatcggtcactttacccgttgtttgtaattttttagtcgctttactacttgaactcgatgaagtgcctggaagacttgtgcaacctgctaacaataaaagagttgctgctgcaacgacccatattttatactttgccactgagaatggtgcctccttaattccgattaaagcgcgttaaataaattaaacgcgcgctcttggttattataccgaactttacctactgcgccaaataattatctaaatcagcttcattaataatggggatggccaatgactgtgctttttcaagtttgctaccagcatcttgacccgcaattaacgcatccgtcttcttagaaacagaacctgtgaccttcgcgccgttatcttcaagcaattgcttcaattcaccacgtgtatactgctctaatttacccgttaaaacaaccgtcttaccgttaaaatagctgtcactagttgctgcttgggctttagtaacaccggtataagttaaattaacgccaactgcttctaattctgccatcaaggtttggacttggctatccgcaaaataagtcaccaggctgtcggcaataatcgtgccaatcgtatcaaccgtaatgatggtttcttgatcactcgccatcaaggctgctaagttttggaaatgttcagccaataaacgggcagctttagcacccacatggcgaatccctaacccaaataataacctttctagcgaattctgacgactagcatcgatggcatttaataaattattaatagatttttctttaaatttatccaattgggctaaatcatccgccgttaaacggtataaatcggccacatcgtggattaactctttttctaagagttgtgtaatgattcgaggccctaaaccatcgatattcatcgcgttccgggaagcaaaatgggtgagttgttccttcatttgagccggacacattggattaatgcagcgtaatgcgacttcttcatccagatgcactaaatcgtgaccacacgatggacaagttgttggtatgccgtacgcttggctatcgctagggcgtttggctaaaacaacttgcgaaatttctggaataatatctcccgctttgtgcaagagcactgtatcaagcaatcgaacatctttatcgcgtaacatatccgcattgtgtaatgatgctcgtgaaacggtcgtcccagctagttgaaccggatccataaccgcggttggtgtcacaaccccagttcggccaacggtccattcgatttcacgaacgacggtctctgcttcttcaggtgggaatttataggcaatttcccagcgtggcactttaaccgtgttgcctaattgacgttggagcgcaagatcatttacttttaaaacaaccccatcaatgccatacgccaaatcgttccgtgtcccttggtattgttcgataaacgcctgtacctcagccatattttggcagacaacagacgttgggttcacgttaaaacctaattcagctaaaacatggagggcctcactttgcgttgtcgcctgcacatcatcaaacgtgacaatcgtatagataaaggcactcaattgacgcgcagctgccaccttagcatccaattggcgtaaactaccagccgccgcgttccgtggattagcaaacggttcttggccttctgcttcccgtttttgattcaaatctgcaaaagccgctttgggcatgtaacattcaccgcggacctcaattgaaacgggacgcgttagtttttgcggaatcgccttgattgtctttaaattctgagtaatatcttcaccaattgtcccgttaccacgcgtggccccccggacaaagcggcctttttcataaattaaatcaatcgctaagccatcgatttttaactcgacattatactcgatttccgttgccgtattttttcgtaaccgttggtcaaacgctgccaactcggcttcagaaaagacatcccccatcgataacatgggaatctcatgcgtgacctttttaaaacctggtaagacttggccaccgactttttgagttggtgaatcattggtcacaatcaccggaaaagcggcttcgagctgctctaaatcacgatacaactcatcgtacacatgatcttccactaagggcgcatcctgtgtatagtacgcctgactgtagtcggctaattgatcgcgcaattgttgcgcaagtgaagccgcctcactctgggtataatcttcaactggtttggctaaacccatattggacactcctttgttggattgaaacgtgctctgttaggcatactcttccggttattcacggtattacactaatcatcagagtataatcgcctgcttgcgcactttattctactttttctattggtgcgaagcttgctagtagtctcttgacaccttgttccttgaaggcgatgtctagttcttggtcgccgcctgtgccgttgaccttgacgactgtgccaatgccccacttcttatgttggactttttggcccgcttgccaactaccactcttatcgccaccggttgtatcggcaattttatgactagtggttgttttaggcccgttatacgtcgtagcggttgctctggcgtagctattcgacttgccaaatggtagcttacgttctggaatactgccagcattgccgttcgcgtaatccaataatttatcatcaatttcaccaacaaatcgtgaagcttggttactttgttgacgaccatacaacatccgtgaataagcattcgttaaataaagcttactttcagcacgggtaattccaacatacgccaaacgccgttcttcttctaactcgtcttcttccaataacgcccgtgatagtgggaaaataccttcttccatccccattaaaaagactactgggaactcaaggcctttagccgcatgcaaggtcatcatcgtgacttcactagcttcttcttcaacagaatccaaatcagaaaccaatgataattccgctaagaagtccacaaataaatcactgtcttcttcttcgggttcataatgctcatcaaattgtttcgttacagatagtaattcttcaatattttctaaacgggtttgtgattctagtgtattttcaacttcaagtgccttcttgtagccggtcttgtccaataattgttcggtcaagtccgtcacgtttaagaattcacgcatcttcgctaaatcgccaattacgttcccaaagtcgattaaagtattgcgacttctagcgggaatcgttgataattcagcattttgtgccgcttccaataatgaccattggtgatcatcggcaaactgccctaatttttcaagcgtgccagggccaatcccccgtttagggctgttgacgatccgttcaaaactcattgaatcggccgcattaacgactaaacgtaaataagcgaggatatccttaatttctttccggtcgtagaatttgtgtccgccgaccattttataaggcatgttagctttaacaaacgcttcttcaattgtccgagattgcgcattagtccgatataacactgcaaagtcgccgtatttacggttatttttttgcatttcttcttggatcttcgtgatgacaaataaagattcgtcgcgttcactctggcctcgataatacgtaatcggttggccttcttcattttgggtccacaattcctttggtttccggaaagtattgcggttaatgaccccattagcggcttccaaaatggtcttggttgaccggtaattttgttccaacatcactgatttagcgtctggataaccatgttcaaagttcatgatattgctgatatcagcaccccgccaaccgtaaatactttgatcggcatccccaacaacacagaggttttgatacttctcagctaacatattcaccaatgtgtattgcgcttcattggtatcttggtattcatcaacgtgaatgtattggaatttttcttgataatgtgccaaagtttccttattttctctaaataagcgaattgtttgcatgattaaatcatcaaaatcaagcgcttggttttgatggagtcgtttttgatattctgtatagcattttgccgccatcttttcaaacggtccattggctaaaccttgatagtccgctggtgtttgaagcgcatttttcgctttactgattgtccctaaaatcgctttgggttcatattttttagtatcgatatttaagtcccgacaaacatggcgcatcaacgtcaattgttcagaaggatccgcaatcgtgaaggcccgattatagccgatttgttcaatttcacgccgtaaaatacgcacacaaagggcatggaaggttgaaacccaaacatcttgagcaccttcgcctagtaaattgcccacccgttcgcgcatttcgcgcgctgctttattggtaaaagtgatggctaaaattcgccatggcaatacatgtttttcttcaattaaatacgcaacacggtgcgttaacacccgcgtcttaccactgccggcacccgccataattaacagtggcccttcagttgttagaaccgcctcagcttgttcgggattcattccttttaagagctcttgttcagacaaatatagtcatccttccgtaattgcaattagtctttattataacaaactagataggtagaaaaaagcgaacacgccttagtaaccggattacaattctagtcaatcttatgccttgacctgggacgcgtttcataaattatactcacattaatccaagaaaggtggcattcattatgattaaatatattttttctgacttagatggcacattgttaaaccaggcgggacaactttccgaaaaagatatcgcaacggtcaaaacaagcccgctaccaatctcattagtttcagcccgttcgccgcaagaaatgcaggcgacggttgaacaactcgcactgacaaccccacaagttgcttttaatggcggcctcatctacaaacctaccgatttattccccatggtcttagccgaatatccactcgtaacaacgactgtcgcacaactagttgctgcattacaaaccaaatttaacgacatcagtttaagcgcctatgatttacagcattggtacacacaaaaaattgatgccggaatcgaaactgaagcccaactgaccggactcttgccaaccatcattaattttgacgaccagttgaaaaacccattcatcaaaatttttaaggtcatgttgatgattccagaagatgaacagcgcacagccgttttacaatttattgaccaacttcacttacctagcctttccgtccaacaatcaggtacaatgtacgtagaaatcaccagtcaacaagcgactaaagcacaggccttaatggccattctcaaaaatgccggcttgatgcccgccgactgtgccgcttttggcgcaggtcaaaacgatttatcgatgttaagcatcgtcgggcacccaattgtgatgggcaatgcaagtgatcaaattcaagctgccggtcaatttattactaaaaccaatcatcatagtggctttagctacgggattaagaaatacattacaaaagttaatcaaaaagtaggttaaaatcatgccaaccattcgtgatattgctagaaaaagcggctattcggtttcgaccgtctcccgcgttttaaatcaacaaaaatacgtgtctaacgctgccaaagaagcgattgaagcggtcatcaagcaactagattacgtccccaatagtttggcgcgcgatttaagctttggccaaaataaaaatatcggcgtcgttctaccgcacaatgaccatccctattttaatcagctcttaaacgggatcatggacgccgccttttcgagtggctatcacattgtgttactgccttcagaatacaatcgaaccgttgagcgcgattacctcgagcagttgaagcggaagaattttacggcgttgatttttacctcgcacgaactaccgctagcggttttagaagactatacgcgctacggtcagattgtttgctgtgaaaatccagggcagcatcatatttcagcggtgtattccaaccgtgaaccggcctatttagccgcctttgactaccttaaatcgcttgaggtccaacaaatcgggttgctcttgagtcgtaatctggccaaaagtcccacctgggtggccgtcacaggggcttatcaacaggttttccaccaaaagccaaatcagcagttgatgattggtggcatgcgctcttttgaagatggctaccgcgccgccgaacaactgattgcacgccaaccagctcttaattgctattttactaacggtgatgatattgcggctggcgtacggcaatatcattgggaccaccaacttcctgtccccattttaattgggcaggaaaaacaactctcgagtttcctcctaaaaatgcccaccattgaccaccatttcttcacattggggcaaaaagcctttgaactcgccctcagcaatcaacaccatcaatgtgcatttgaatcggaatttatttggcgctaaaaaacgaaagtgtgccatcagtcgggtatctcctgaggattaacagagagtggcgaatgattgcgccagcaatcgtttgccattcggcgttaaccgtaaagagatgactgatagaacacgtttaaactatcaaaatttgaatacaaaaaacggcgctaaagacaaaattaattttgtcccagcgccgtttttttgatgtttgagtagtgctcagagcctacccgttggcaaaaccactcttatttaaaacgtgctttttccaacaacctcttgtgcctagctttgcatcgtgaataatcgattccatcgcttattcacgacgctttgctagtgctcagagcctacccgttggcaaaaccactcttattttgaaacgtgcttttgttagcaacttcttgcgtttagtccttcagtcaaacaaccgactttgtcggttattcgcctgattagcctaatcctcagaagttacccactaacaaaaccactcttatttaaatactctgtcaaagattgtttggacttggctgaggtgccagtggtagtcgaaggcgtcgtccatttctgctggtgttaattgtgccatgacttttggatctgcttctaataattgacggaaatctttttgttcatcccatgcaagggctgttttgggttgtaccaaatcgtaagctgcttctcgacttaacccagaatcaactaacttcaataagactcgttggctgtaaatcaagccgtgcgttaaattcatgtcggctttcattttttctgggaaaacagttaatttttcaataatccgtgtgaaccggtttaagatgtaatctaataaaatcgtcgtatctggcaagataatccgttctgctgaactatgtgaaatatcccgttcatgccataatgaaacatcttccatccccgtgatgacgtgaccacgaatgacacgggctaacccactgacattttcagaactgattggattgcgtttatgtggcattgctgaagagcccttttgacctttagcaaagaattcttccacttcgcgaacttcggtacgttgtaaatgacgaatttcagtagcaaaatgttcgattgatgttgcgacaactgccattgtattaatgtaatcggcatgcaaatcacgtggcaagacttgtgttgaaatatcttgcgcccgaataccaagattttctgtcacgtaagcttcgatttctggtgagatattcgcaaaagtaccgactgccccactgattttaccagcttcaacgcctgctgcagcccgttcaaaacgttcttgattccgtttcatttcagcataccaagtcgccaatttcaaaccgaaagtcgttggttcagcatgcacaccgtgtgtccggccaatcatcaccgtattttgatattcgtaagctttttgtttcaaaacggccataaaccgttcgatatcggcccgaattaagtcgttggcttgttttaaaatatagccttgtgctgtatcaacaacatctgtagacgttaaaccgtagtgcacccatttcttttcggcacccaatgattctgaaactgcgcgagtaaaggcgaccacatcatgatgtgtaattgcttctaggcggttaatttcttcaacgtcaaagctcgcattagcgcgcactttagcggcgtcttccgctggaatatcgcctaatttagcccaggcttctacggctaaaatctcaacttctagccaagcttggtagcgattctcagtagtccagatggcacccatttctgggcgtgtataacgttctaacatgtttcttcctccaaatacgttcagttgaaagcatcaactaacggtcgatttctttttaaattaattccgctgcttcaaaattatctaatagtggttgaatattatgccctacagctgtgatataaccactttcttgcgcaccaattgtctggcaacgattgaaataccaatccggcttaatcttcatttgtgtttgaatcagtggccattgttctggcgttgttcttaaacaaacacccgcattatttaagcgtgaagggccaattgctaactggcaaatcgcctttaagtggtattcatattgtgaaaagttcaaaatgcggttaagcacatccccagtttcatgtggtgcggtgacaattcgcttaacgtagatgttcatatccgcggtcaagaagaattcaatcccgaagatgcccatataatctaggttttgcccaatcacagtcgctaagcgttcaatttcttctgcgacatcttgatcgatgcgtgccggcgtaattgataattgtaaatcttggtcttgcatctgattttcaataatcggtaacgtgacaacttggccttcataatccttggcaaccatcacggccaattcttgttgtttagggacccatgattctaataagtaggcacccaattccaacgtatcatccatcttggccaaatcggctggtgattcaaggtgttgatgatattgccgaccgaagccgcgttgaatcggttttaaaatacagggatagccaattgaatcaaccccttgttcaatatccgtcttatcaaccaccgtcacatatggtgagatattgatattgagatcactcaaaaagaccttctcgaggtaacgatcttgcgtcattgagagcgcatcgctaccttgtgggacattgtaatcttgaaccaactgttctagtagtgtttcatcgagcgattcatccgtatacgtgagcacctggcaacaatcgcctaaacgtgcgagtgtttcgtattgctgtggatcgccttcaatctgaatatcaagtactgcggctaatgatgaatcttgtgtctgttcggtgacaattgccgcaacgcggtagcccatttccttagcttttaaagccaacttgtacgcacgttgatcatttccaataattccaatcgtttgacccggataaataactggcatctttctacctactttcttatgcacatgacttcaattctcagatacttctattatagcgaattctatccctaactacctagtactttaactaaatcttgatatttttcgcacaaaaaaagaccatcactggcctttttcaaattaattttcgttattttcgtctaggaagaccacttcgccttgttcaaaagcagcaatccgtgctaatgattcaacgtgaatgccgcgttggtctaataactcgcgacccttttggaatgttttttcgatgacaatgccgaccccttcgagttgggcaccagcttggtcgataatttctaataagccttcaactgcttgaccgtttgctaagaaatcatcaatcactaaaacacgatcgttttcgttcaagaatttcttagaaattgaaatgtggttgttaactttcttcgtatatgaataaacagttgcgctatacatattatcttggagtgttaaactcttgtgcttacgtgcaaaaacaacgggaacgtggaaagcaaggccagaaaagactgctggggcaatgcctgatgattcaaccgttaggattttagtaattggggcaccttcaaataatcgcttaaactcttcacccatcgctgccatgagttctggatcaacttgatgatttaagaagttgtcaaccttcaatacatcttctcctaaaacctgaccatcttttttaatacgttcctctaataaccgcacacctagcactcccttgttttctgaaattgaattaaaaataggttaccacaaataaaagctagcgacaactttaattaagacttttcaagatttattatcataaacaagattatttatagtgtttatcaatcaaattggtccaatcgataggtcttgacgagttcgattaacttctccggataattaggatccgttgcataaccatcttgcttgagcgcttgggcagcctgtgtataattggtggctgccacaacgtgttgataatgattatgatcccaagaggtcccgtgcgcaaagagtaaaacgtgatctaacatagactcgcgatagtcacggtaaacgcgaaagcgcgcggtagtcgtcacccattggccgttcaagtattccttagtggtcatctctttggtattatccgggtcatcgcctttaatcccaaaatagttatggtaatccgctgcaagtgagcttttgccccaatcactttctaagatggcttgggccagtgtaacactagaaagcacatggtatttttgttgtaattcttgtgcatagggtgctaattgattaatgaattcttttttcttcttcactttagctaattcttcttgtttggcctcattggctaagcgttcctgagtttgtgcaccggtgtattgaatatatactaacccaactcccagagcaaataaaacgcccaacaggacgactagccattctgtcggttgtctctttttagtgttgtaccattttttggtcgtgcgccgttttttcttcttcgccactaatctgcctctacttcgttcaatctactttatattgtacacaaaattacctcgaagaccaatgcttaatctgcttaattacctttaattcctattttgtttttttattgttataatatcgtttggaaccgattacgatagtaaaggactgatttatttgacaactcttaactggggcattatgggtctaggcaatattgccggtagttttgcaacttacttcaaccaaccggacggccaaatctatggtgctgcttctcgttcattagaaaaggcaaacgccttcacccaacagtatcatattccccatgcttatggtagctacgctgagatgttggccgaccctgccattgatattatctacgtcgccacacctcacaactatcactttgatgggattatggcgagcttaaacgctggtaaacatgtcttttgcgaaaaagccatcacaatgaaccgtcgcgaattaaatgcggctaaagcactagcggccgaaaaacatttaatcttggctgaagccatgacgatttatcatatgccactttttgcagaaattgaacgtcaacaagttgcccaagatttaggcgctttaaaatcaattcaagtcactttcgggagctacaaagaactcgatccaactaatcgctttttcaatcccgaattagccggtggcgcaatgttagatatcggtgtttacgccctcgcatttgcccggcggatgctgagtgctaaaccagaattgattgccacccagtgggtcccatcagaatccggtgtcgatcaacaatcaacactccttcttaacaatgctcatcaagaaatggtgaccgtgacccttaaccttcacgcgaagatgcctaaacaaggcgtcctcgtttatgaaaaaggctacgtaacggtcgatgattatccacgaccagataaggcccaattgaccttccctgatgggactactcaaatcatccaagcgggcgatgctaccaacgctatgaactacgaattacacgacttccaagaagttgttcgtagtcatcaagaaaatgacacactcgccctaacaagcgacgtcatggacattatgaccgacgcccgcgcacaatggggttttgtttacccatttgaacaaccttcagacttaatttaaaaggattaatgataaaaaggactaggactaaaagcatttttttgtcctagtcctttttatgttggcctcttatagtggttgactcaacaccaccatgtcctgcaatcgaatcccattttcaataattggtgcttgatattgttcaaaaaagtttttacgaatatgatcgaaacgaaacccttggcgcagataaaagccgattgctgccaagctaccatccccggtgcccactagtaatgtctggtaccctaagtcaaccatcatctgtttcaaatcgttgagcgcttgttgcccataaccttgattccgataagctggcaataaggcgatatttttcaattcaacttgtgtttggtcaacaaacgtcacatgcataacgccaattacggttgattggccggctaagtgaatgctatagagctgaccctcgtttaaataacgacgaatcatgccgacttcttcatctgctaatcgtaaataaggtaagtaattctcccgctcatttggggcaatcatttgataagctaacatcctgccgcctttctttagccataaaaaaaggaccaactgattgacagttgatccacgactaatatttataaattagtttttgtttacgttaacggcttgtggtccacgatcgctttcttcgatatcgaaagaaacgctttgaccttcttcaagagtcttgtagccttcaccttggatagctgagaaatgtacgaatacatcactaccatcttcgcgagttacaaagccataacctttttctgcgttaaaccattttacagttccgttttccatgagaaaactcctccttgtgtcgttagacacatataaatttgtgtatttctgtcggtgcgatggaagaaagttcttttggaaacattcgaaccataacctgtcaaaaagtacaaacatagtgtaacatatgaaaaaaagagaaacaaccctaaacactaaaaaataaaccgttttctttctacgataaccgaacttttatactttccattaaattgacgtttttccgtcatccaccatggtaaacggttggcttttagactgatttacgctaagatgaagttaacgaatttaactactggagtgcctgacaatgctaaaaatactaaaacgattactccccattttgggactactatttctacttgctggttgcgaaaaaccacttgatacgaaacaacaggtcaaagacgacctcaacactattttacagatttctaaaacgcaacaaacagcgcttagtaccctagagaatgctggtcaaggggtacctgatagttatcttaagattcaagaaaaataccctgatcaaaatcttttagaggttaagggctctaaaattgcgcaaactgccgcaacacgaaccgcagcttatgacacactcaaggcacaacaagctgaattaaagccagtcgttaagcgcttgattaaaattgctaatcaagaaagtgatgagttaccaattgaattcatcaaggatttaaatcagagcttgaagctgtctgcacttgattacacaacactttctaatttctacgacgctgccaccactgctgaaaccgacttttatgccgatcacacatcagctgatgcacacgcggacgatctagcggcacctatcaaccgattaaatcaatattatagtgccatctaccaacaagcagaaatcgctaaggttaatatcaatacggtcactgctcaagctaagaaagttcaaaaacaattagactaatcacttaaaaaagagtcgggacaaaagtaatttttgtcccaactcttttttattcgcgtttaaaccttaacaacggtttagctacaaacggtgtcacaatcaccgctaaggctatttccatcaaagcgttaatcgccacagcactcaacattacgataattaagtgactgacgtccgttttataaataccggctgcttgttgactgtaaaaagcccatgtcaacagaatgactaacgtcgtattaacgatggtgccaaagaaagcggcgattgccatcgagccccgttgccccgctttagtattgtgtaagtgttgatataataatccggccactaaccccaccatcaaacgcggtaaaatagcgattaccgggttttggaagatcaataaggttaatgcatcgactggcgctgtataggcgtgaatcagggataatgtcccccagattgcgcctagagttgcgccgccacaagtacctaaaataatcgccccaatgatgacggttaaatgcatcgtggtaacgccgggtaaccctggtagaatataaatataaccaaccatcggcacaaaactctgaatcattaacaatgccgttagaatcgctagaatgctgatcttatacgctgatgaattacgtgtcatctctacttacctctcccattaacttattgcccattatagcgatttacgaaattgaattcaattctcaaacttaattaggacacaaaaaaacgacaccgctaacggtatcgtttaacttgttatcatatgcgggtgagaagactcgaacttccaccgggaaaattcccgacaagatccttaatcttgcgcgtctgccattccgccacacccgcgatacttgctttatgactttaagccacgtacattagtataagagaaacccgaattgaagtcaacaaaaaatcgctctggaggccaaaaatgtttatcgaaaccgctaatttaaccgatatcggtgccttaacgacgctttatcaagctttaacaactgaaatgcacgcattccaaccgactaattatcaagaaaagagcagtcctgatttcttcacctggaaaatgatggttgaagacaaacgccaaactgtctatatcactcgcaatcaggatcagataacgggtttttgtcacgttaccacagcacaaactagtccttccaatctctttatcagccataaatttgcctacgtcactgcattatacgtccatcctgactatcgtcgccaaggaattgcaacggcgttacttgcaaaagcccgtacttggcaaaaagaaaaacaactcgcctttttggagctaaccgtcttgggcaataaccaatccgccctgcaactctatcaaaaattaggctttgtgacacaaaaccaaacgctccgacaagtttaaaaaaacaggccctgggacaaaattatttttgtctcagggcctgtttttaatctctcaatacttatggcacacttctttttttaaatttcttttactaattttaaatgaccatggcaacgacgacagacataacgcgttgtattgatatgccgttgtcgttgatacaactggccacatttggtgcattgataggctagtcgtttttgtggtgcctttttagccgtgaccggtggtgcaaagcgcgcaccaccaacttgttgtaagagtcgcttaaaatcatggtctcgatgccgatacccacggtgcaataaatgcaggtggtaatgacacagctcatgtttaataatgccttctaaaacagcctgtccttgggcaaccatcaacgggttaatgtcgatgtggtggtcttgcagatgataacgaccccctgttgtttttaagcgccgattaaaacttgcctggtggctaaacgggcgattaaacgtggttactgaaatattttgaatgagttgcgttaattcttgatccgtcatcattaatcagttgctttaggcgccttcatcgtcaattgaacccgttcacgttcttgatcgacgcttaagacccaaacctgaacaacatcaccgactgaaacttcatcagatggatgtttaacaaagtgattggccaattgcgaaatatgaactaagccatcatgtttaacaccgatatccacaaaagcaccgaaatcaatgacattccgcacggttccttctagggccatattcggtttcaaatcggcgagggttaagacatcatgccgtagcagtggtgctgtcatttgatcccgcaaatcccgacctggtttttgtaaaccgcttaagatatcttcaagtgtttcagagccgaccgctaattcggtcgccaaatcagtcactgttaattgcttaattgctgctgataattctggtgttcctaaagcctccaaagtgacacccaacgattttaaaatcgtcttggctactggatagctttcaggatgaatatccgtattgtctaatgggttgtcgccaccgatgattcgcaagaacccaacggcttgttcgaatgccttagggcctaagcgcggcactttcttcaattcactgcgtttttgatataagccgttttcgttacggtattggacaatattttgggcagtcgtcgctgataacccagaaatatgttgcaagagttgtggactagcggtgttcaagttaacccctacgctattgacaacatcttcaatgactacgtctaattgcgtcgtcaattccttttgggcaacatcgtgttggtattgcccgacaccgactgcttgtggatcaatcttaatcaattctgctaagggatcttgtaagcgccgtgcgatactaatcgcactccgctcttcaacgtgtagatctgggaattcagcccgcgctgtatcacttgctgaataaacggaagcccctgcttcgttgacaatcacgtaaaagatttcccgggaaatggtttttaaaactgatgccacaaattcttcagattcacgactagcagtcccattcccgattgcaatcatttcaacattatatttttcaaggaattgcttgaattcatcggcagctgctgttcgtttaggtgctgcagctggtttatgcggatagatcactaatttatctagaaattttccagtcccatcgacaacggctaatttacagcctgttcggtaagcagggtcaaaacctaaaacaactttgcctttcaaaggcggttgtaataaaagatgctttaaattatcgccaaagacggcaattgcttgttgatcagccttttcttttaactgcttccgcaattcacgttcaatggccgggccaatgaatcgtttataggcatcttcaatagctgtcttaataatttgggcggcagctgagtcttgaccgtgaataacagcttgagcaatatgtccaacgatcatattttcggcaacttctagcttcaccttcaagataccttcgtgttcgccacgattaatcgctaaatattgatgttccgcaatcttattaatcggtgctgagaaatcataatagatttgataaacttgcttatcatcgctgtcggcatctttcacctgactcacaatttgcccgttttgacgggtgtattgtcgtgtccagtcacggaaagtcgctgtttcactaatattttcagcgataatttcgtgtacacccgctaaaacaggatctgtatcggtaatcttttggtctgggttaagataatcggccgctttttccaggaggacttgttctgaaaagttcggtaattgcgcaatcaggttggcaaacggttctaacccagcttctttagcaatcgtcgcctttgtccgccgtttttgcttatacggcaggtataaatcctcaagcacttgtaattggctagcggcttcgatttgcttttgtaaaaccggcgttaacttagcttgttcggcaatattcttgataatatcggtcttccgtttttcaagcgttgttaagtattggaaggtgtgttcgatttcgcgaatttgaacttcgtctaaactaccagtccgttcctttcgataccgcgccacaaatggtacggtgttaccttcgtctaataaggttaacacggcattaatttgttgtggtcgatattgcgtcagttgtttggtgacaagttgttgaatatcagtcatgtgcgtccctacctttatcttcaataaaaaaacagcacccgtcttgggaactgtcatgagttgatctaagcaatttttgagatgttttggatatacttagaaattcgttctgttgctttgtcttggttcatttctgaagcagcaaaagcttgcatatcaactgtttgatcatcatgcatgcttgtaattaaatcttcgcaaccttgaacgaaatcagtataagcaccgattaaacgttggttgttacccattaaacgagctggggcaacggctgtcttaaattgtgctaagaattcgtggtattgatccacaccgtctctgaagatttgggctgtcttttggtaatcttgttcgctcatttcagctaacttaccatcagcaacggccgctttcaaagggacgaaatatttgctcatgccttcttgcactttttcagtgtcgtcgattaaatcgttaacagcttggccgtatttagccaacttttgttgtgttttattcatgttaatcctcctagtttcctatgcttcagtatactaattctggtatcggcttgcaagagtgcgtttgaaacgcatttgacttcgagcattagcatcgtgttgtgaataaccgatataatcggttatttgcaatacgtcgctaagcacagaaggcagtttcaaaaagcacgtttcaatcgggtaacaattaaataaggcaccaaggacaaaaataacttttgtcgttagtaccttattcgttctatttctttttaagcatcaaactcgtccatgattgaccaagcatcagcttgatcagtaaatcaacacaaacgaaagtgacaagataaatcaagaaacttaacggccagttgtgctgagcttgaactaagtgttcgaaaataccaaagattactaacgttattagaaactgtaagaaaatccgcatagttaatccccctctactagtattcactagtaagtaaaattatcaaaagacatctcaacgctaaccaatttagcacctttattatatattttaagaaaccgttttacaacctgtattcgtcattatttagcagctcttctttggaagaacttcacgatttcaacgatgactactagcataaatgaagctgctagtacaatcccccattgatataaatcaaggtgtgagacatggaataagccattgagccctggaatcatgattgttgcggctaataagataaatgaagctaaaacagcccagttgaaggctttattcttaaagaagccaactgtaaagattgattgatggactgatttaacgttgaatgcgtggaagagttggatcatccctaacgttgcatacgccattgttaaagcatccgcatgagctaagccacttgcttgatgcactgggaacgtaatcgctaacgcataaacggctaaggtaatcccaccttctaataggccttggtagataatcgcttggaacacgccacctgagaagaagtttgatttacgcccacgtggtttttgattcataatccctggttcagttggttcaacccccaaggcaatcgctgggaaagtatccgttactaaattaatccacaagatatgcactggttgcagaatttgccaacctaaaaccgtcatcatgaataaagttaacacttcacccaagttggctgataaaagatattgaatcgatttttggatattagcaaagactttccggccttctttaaccgcaatcacaattgttgagaagttatcatcggctaagaccatatcactggcccctttagaaacttcagtcccggtgatccccatcccaataccgatatcggctgatttgagggctggtgcatcattgacaccatcaccagtcatcgcaacaaccttaccgtgtttttgccaagctttcacaattcgtactttatgttcaggcgcaacccgcgcataaacggcgtattgagtaacttttttagcgaattcttgatcatccatttggtctaactcagcgccagtaataacggcggcatccgcatcttcttctggggtaataatccctaaacgaagcgcgattgcttcggctgtatcgcggtgatccccagtaatcattagggtccggataccagctgaatgcgcatctgttacagcttgttttgcttctggtcgctcaggatcaatcatcccaactaagccagcgaaaattaaatcagtttcaatcgttggatcaaccgttgctggcacacttggtaagactttataagccaacgctaagacccgcaaggcttgttttgccaaaccatggttcgtgtctaataataattggcgctctgcatcgtccatcggttgaacaacgccttgtgcgtcgatataatgcgtaacgcgtttgagcaattcatccggtgcgcctttcgtggtcattaagaattgaccatcagcttgttgatgaattgtggtcatcaacttccgctctgaatcaaatggtacttcagcgacccgtggttcggctgctaaagctgcgttaatatcaaaatctttatcacgcccatacgcgattagggctgtttcggtcggatcaccaatcatttcaccgtcagccttaattttagtatcattggctaaattcatgatttttaatgttaaattatccgctggtaatgttgcgccagcatcttgtaattggttgttagtaaatattttttcgacggtcatttggttcatcgtcaacgtcccagttttatcagacgcaataatatccgtactccctagtgtttctactgcaggtaacttacgaacaatagcctttcttttaaccatcttctgcgtccctaaagcaaggataatcgtcacaattgcaggtaggccttccggaatcgctgcgaccgctaacgaaatagcagttaataacatgttaattggtgattgtgcgtggcgtaagtaacccaccacaaaaacaattgcagcaataatcaagatcataatcgtcaaactcttacctaattggctcaagttcatctgtaatggcgtcgttgtttcgtcggcttggttgagcatcccagcaattttaccaacttcggtctgcatcccagtccccgttacaaccccaacgccacgaccgtaagtaacattactattcataaacgccatattggtccgatcaccaatcccactttctggatcagtcaaggtatcaacggtcttatcaactgggacggattccccagttaaagcggactcttcgattttcaaagcagctgattcaagtaagcgaagatccgcgggcacaatatcgccggcttccagcaacacgatatcgccaactacgagttcttcactcttaatcgtcacgatttcgccatctcgacgaacgtgtgcatcaggtgtcgccatttcttttaaagcgttaattgcttgttccgcctttgcttcttggaaaaccccaaaaatcgcatttaagatcacaacggctagaataatgaatgcgtctggccattcatgtgctaaaaagcccgcgatcattgctgcgactaataacacaataatcataaaatctttgaactgttctaaaaaacgaatcgctaaacttttgcgtttcttttcagtcaattgattccgaccattttctgccaaacgtttttcaacctgttcttgggttaacccttgtggcgttgttgcgagcgctttaagtgttgcgtctgttgattgtgtaaaaaatgtggtttgtttatcgaccattaccttgcctcctataaatttgattttgggggtaaaaaaagagacctacaggaattctaaaaatccctataagtctcactaattaagataacaccagaatattgccttgttggtggcgttatcgcagacaagctgccagttactcccttatcgttaaccccattataaggtatagacaatctaaaaggcaagtaaatagttgttttaataactagattggtttacgagactaggctcgaaggctaaacgtgcttttgtcagtagctttctgtgctttgctaaacttatcaaaccggtgatttcatcaccaattcgctaagttctgcaaatgctcaaaagctaaccactgacaacgcactctgttttattgccagaacgtatcatagattgttattggtaaatgacgcttgtgggccgtttttttgtaccagttttcaatcttcgttgcggcttcttcactgacctgacgaccttctaaatagtcgtcaatttgatcatatgtgacgcccaatgctaattcatctggtaatgctggacggtcttcttcaagatccgccgttggtactttttcatagaggtgtttaggcgcaccgagttcggctaacatggccttgccttgacgcttattgagtctgaagattggcactaaatctgcgccgccatcaccaaacttcgtataaaaacccgtgatggattcggcagaatgatccgttcccaaaacagcaccactattttcaccagcgacgccatattgggcaatcatccgcacgcgggctttaatattgcccttattgaagtcactaacaattacaccagtttccgcaagggattgaaccatcgcgtccactgagcccttaatattgacccgtttgacttgatcagctgccataaattcgattgcggccatcgcatccgattcatcagcttgttccccataaggtaaccgcactgcgataaattggtaactttcatcgccagtttcagcccgcatctcttgcatggctttttcagccaatgcgcccactaaagttgaatcttggccgcctgaaatgcctaagacatagctttttaagaatgtatttttctttagataagccttcataaaatcaaccgatcggcgaatctctttggcgggatcgatcgttggttgtgtttttaaggctgcaataatttctgcttgtaaagcgttcatttgccagatactccttcaaaaataatcgattctagtgcattaaattaacgtcttctctgactttgcggattgaactcatcttattgtcccaagtccgttgtgatagatcgactgggtaatcctgtggattcaagtcacgtttgtattcatcccaaagtgaatcaaggttttcagcacagaacttcttaattgccgctaattcaggcaacgtatagacccgtttgccgttttcaaaaatagtccgtaagattggtcgggcattgaagtcggtcacggtcttattgatgtatgtgtaattaggatggaacatgtaaatcgtatcttgttcaagtggatcttcatcccataatgtgatgtagtccccttctgatttaccgtcaacttgtttggtaattcgccaaacttgcttgcggcctggtgttgagactttttcagcattacttgataatttaatggtatcgaccatcttaccatctgagttttcaattgaaaccaacttataaaccgcgcccaaggctggttggtcgtaagcggtaattaacttcgtcccaacgccccaaacatcgattttagcttcttgcatcttcaagttttggattgtcttttcatctaaatcgttagaagcgtaaattttagcgtccgtgaagcctgcttcatccaattgttggcgcacacgtttggaaatataggccatatcgccactatcaatccgcacaccttggaaattaatccggctaccgaattcgcgcgcaactcggattgcactcggcacaccactcttcaaagtatcataagtatccacaaggaagacacagtcccgatgcgtttcagcataggcccggaaggcttcgtaatcgttacggtaagcttgaactaaagaatgcgcatgtgttccgcttgctggaatcccgaaaattttagaagctcgtacattactggttgcatcaaagccaccaatataagcagcgcgtgtgccccataaagcagcatccatttcttgggcccggcgtgtcccgaattctaagacgggatccttgccgaccactgatttgatccgtgctgctttggttgcaatcaaggtttggtaattgacaatatttaataacgccgtttcaatcaattggcattgggcgagtggcccttctacttgcatgattggttcattgccaaagaccaattcgccttcaaccgctgaacgaaccgttaaatcaaaatctaattctgctagatacgtcaaaaaatcttcaggataaccgacttcatcccgtaaataagctaaatcgctctcggtaaagcggagattctcaagataattaacgatatgttccaaaccagcaaaaatagcatacccattttcaaaaggtagttttctgaaatagcattcgaaaaccgctgtccgattatggagtccctttttaaaataagttaacatcatattgagctgatacaagtctgtatgtaacaacaaactatcatcaggatataatttttgcatgtcgcactcctaattagagatatatttggtatacttagttgaagctattatacaataaaacagcgagttctgcataatttcgagaaggagttttacaaatgcaatttccgacagtctcagttttaaatattccttttatcaatactactaaccaagcatttattgcgcaactttcaaaagacttagccgctaacgaaaaccgttttatcgttactgctaatccagaaattgccctctatgccactaaacataacgattacttccaaacgattagccaagccgattacattacaccagacggtattggtattcttaaaggcgccacaatgttaggcacgccgcttacagaacgaattaccggttttgatacgatgacggccttattcgaaattgccaatcaaaacagctatagcgtttatttgcttggtgctaaggaagaagttttacaagccgcttgccaaaacgttgcaaaacaatatcctaacgtcaccatcgtcggccaacacaacggttattttgacgaccaagaagaacaaaaaattgttgccgatatcgaacgaacacaacccaatattattttggcagcacttggcttccccaaacaagaaacctttatcgaagccaatcgtcacaaagttaacgccatttggatgggtgttggcggtagctttgatgttttatcgggaactgttagccgggctccaaaaatttggcaaaaaatgcacttagaatggttctatcgttttgcatcacatccaagtcgcttgaaccgtttcccagcgcttattgaatacatgcaacttattaagaaatctaaaaaataacctcaatacagttagtagccatttaaaatagctattaatacacttatattaagacaagttaccgtataaatacgacagcttgtcttttttatatcattttagaagaaaatttttaataaaataccttttctcacaactatttttaaccataaaaaatagatgctagtaatctatcattactagcatcttaaatctactaaatctctataagattaaacatacctaattagatttctactcttgagctgatatgtagccattataaactgattcatagaacttttcttccgaaaaattattgaccatatacgctctctgtatccccatttgtttaactagttgaccatttttattagcttcgtaggcctgcacaattgcagtctctaatgcttctacttgattaggctgtactaagtattccttatttatcgggaacattgcttcaacatcgcccacatcagtacttataattggaacaccttggttaattgcttccaatagtaccaatggaaaactctcgctttgtgaacttaaaatcgctaaatccatcctctgatacatctgattaatctcatcttgtgttttgaaaccgaccaaccttatctttttctcagcattatgcgatttaatccactcgtgcatctcatcgaataacaccccatcaccaacaattgttagttctgacattggtaaatcagctctaaggaacgcgtccattaaaagaatatgattttttactggatgcaatctcccaaccgtaattacattaaatttatcatgcttaattttatccggtatattatccaaaaagcttaaaccgttcctagccacactaatttttttagtatctattccgaccttgttttttaatatcggtataaaccgtgctgtaactgttaaaaaatgatctgcgtgccttaaactttttaaatttaaccaacctagcaaaacccccttaaaaccattccccataaaatctaatgttggatcactatgaactgttacaacccatttagctttcattttttgactaattttagaatacataaaatttgctcttggtccatgagtatgcacaatatcaattttattattctcaataattaattgaagtttttttaatggactaaaatcaaatcttgatttttgagctaataccgttacctttaaacaattttcacgtgcagcctttgctacaggaccatcttcaaatactactaactctgtttgatgccccttttctgatagaattttcattaatgcaattatatgagtgagtccaccacctgactcatttcccgcattcaaatgcaaaatattcatcatcattatctcccaatcgttcttattaagtttatcaaaggttaaattaattattcacgatctaatattaataatttttgatattcatgattatactggcttctcgacttttgataaaatcttaattgtttacaagttacccagttgaagacagcacttaagatcaaacttatctttctttcgcgtttggcctggctaaaaatatgaaccccttcattaaactgtgcacgctttttcaagttgtaatactgattatcttttagaaatattccaagtgcctgaacatagttagcagaaacaattaaattgccttttaaccgttgctctttaataaacctacttactaaaaatgttttatataaatcactctgagtcatactattatctcggacacgatatttaattaatgattgattaatcgtaccgatttgaaaatccgacataataacacgcaaccataaatcatagtcctcactagctggtaattgttcttgatatcccgataatgcttcaaatacagattttttccccattacacttggatgaactagaaaattttctaatactaataatcttctaacatagattggattagtaatcatagttgcatgttcaccaattagcgatcctgtatcatcgataaaactacagctagttgagactaaatcccaattattattctcaagagacgcaagttctacttcgaatcggtgtagatcagatatatcatcggcatccattctagcaatatactgtcccgtagcatgtgttaatcctttatttaaactagcagctagtccaatattaacatcattgaaaatcagtgaaatccgattatcaatatccctataatcttccagtactgtccgtaattctaccgcctcaggattatccaaaacaataataaactcaaattgagtgaatgtttgttttaaaatggagtctatagcttgttttaactcatccagtttttcattataaactgacataattacactgataactactttttccataatataccccttaatttacctttttattcttctcaaaagttgtttaccatcattagttactcgagtcttcaatacgattaataatacaaagtaaacgatagtacttagaattgtttgtgcaattagagttactaatggatttgatacccggattggtagtaacaatcctaggcctaacgtaataataaaggtaagtatatattttaactgatcattaaatatgccgacttttttaaaatcaccgatgactaatactattcgtaataaacaaacgattaactccgtccctacaataacacctgtagcccctaatgagccatatagcggtactaaaaatatattcgcaagaattgaaaaaattgcccctattaaataggggattgcaaacttaacgtacttaccttgggataacgtatattgattagcaaatactcccccgtaggaaataaagattacaattagactaacccaaaacatattctgagtcatatcggtaaattttgtcccatagaaccacggtacaaatactgccgaattaatcattaaagcagccgtaaaatataaagccacgattgctgtataatctagcgatatcttaacgagtttaaaaattgatttattgtgattttcggagtcgcctgaagcttgtatttgcgccattttaggcattaaaaccatactaactgatgtgacaaccccaacaacagcacgggcaatcatttgagactgcgaataataagctagttgcactgcaccggctaaccattttaccaaggtctgatcaaaactagtgtagagttgtgttgcaatcattggaatagcaacgataattgctttcttccaataattaaacttaattttagtcggtgtgatatctatcgtttgtattaatttaatttcatgttttaaactaaaccaaaaaataatattggctagataagtaatactatttattaaaacataaatccataaatcatctggattatgcacgaatataaaaattgacgttattaagattaatttaatactagtattacgaataactaccttttttatttcacctaatccgataaaaaaccaagaaatatctaagatatacccaattaaaaacggaacttctagaaggaaatagaacttataatcaagcgtaaaaataaccactaatgtatatagtataataactactactccaacaaaagcttgtattttccaaagccccaaaaatctactccaaatagtttctcgatttgattgagcaatttctctagcccctagttgattcatccccattaatatcacgacagataaaaatgttgggattgaatttacataagagtaaactccaactgactcagcccccagcactctagagatataaggaaccgtaataaaaggtaatacaataattagcaattgataaataccgttatacataatattggaaaatatttttttcattattcccatccaatctgcttaataatcctggtaactgcgttatcttgatagtttgcattatggtctcgtgcaaactgctcaataacttgtccattttgtttaagaacagctggaatcgcagctagtaaatccgcacgcttataaacgattggacctggtacaaatcgttgataatcataatagaagcctctcaagttatctttaaacttatcaaaatcgtatgcgtaaaaaagaattggtctatttaataatgaataatcaaagaacacagatgagtaatcagtgattagcatatcggcgactaagaaaagttcctgaatatctggatagctacttgcgtctattacatgtgaatagtcattgcttagcttgaaagtctttgctacatgtggatgtaaccttaatattaagttgaatttatctcccaaaactttttcaaattgttctaaatcaatcgctaacttaaactgactttcatcatctctaaacgttggtgcgtataatatatttaatcgattctggggtaattttagtccttcctgtaattgcatttttaatactgtgttttctcgttcagcaactaaaaaatcgttcctaggtaatcctgatggaataatatgtgaatcatctaaattaaatgcctgtcgatatatccaattatctgaaatagcattagatataaaataatcccaattttttgattcttttaatgtttttgctcgatattcgttatcttcgggtaagtccgctgcaatatgtttcaacggtgtaccgtgccataactgaataaatttcccatttttctgtggtgttagcctctcaggaaaattgacatccatcagccaatatttagcttttgctaaacctcttaaaaatccaattgtccgttgttttacaaaagaaatttttacttctggatattttttcaacaattctttttgttgaacgtcatccaataaccatacaataaaatgtccgtttggaaacttttttactaagccatcaaacataaccgctatattgcctgagaataagcgcccatcaaaactattaaaaaagaaggttctcgaaccttgcttagttactaaacaaaccaatcgatagcatacaacctgatataagaaattaattaattttgacatatatttaacactccacaatactctcgtctattttataatattaaattaataaaaagaactagcaacttgctagttctttcataagctgaccttcaaaaaatgctaatagaattgtgtccattaaaaagtccatcacatttccactatataatgatagtgctaacattaagccaatagctactagatagctaacatttttaaatgtaaatttattctgataagaagacaggacttgaaaaattgcccagagtaatataaatacatatggcattatcaataataagacaccaatatatcccattgaataccattgtgacacaaaatctctttctaggttaaaaatcttattcatccgagtatagccaatccctaaccaatcatctaacctattattgctaactttcttaacccgatttaacatcgctgtttcaatcttacgataattgattcgatctgctaaaggccatttcataacgtctagccaaaaattcggatctactcgataagaataattactttccacaaatcgtggctctaatgaatatttagaataattctttctaatatatttcattacttttgtttctttaccatttgttttaacatgttctgctaattctttatctcgttcctttaccgatttcttgtcactttcacgagtattagcaacatactcattactctgtgagcgattcatagttggtgagattggtagtaatgctaccgataatcctaacaataaaatgatacttgcaatcactttaattgagaaggtaagttccttttttataaaggtaaagtataaatagataattagcatcattaccattgttaaaataaacccaaaagatgctgtctttgtcccaatcataaataatgctaaaaagtgagtaaagattaacgtaatatttaaccaagatattttttttataacataatacattaacaacggtaaaagcataacttctatagctgatatagaattagcaaagtaaaataagccctttgaagctaatccataaaaactatattgatgacttgtccaagtaaaaattgatccgtgtatccagccaccaccatacgaagctaaactaactttgaaaatattagtaataacaatacttccagatattaaccctactaaagtatatactattttctgtaaatctcgttcattgaatgatatgtggctcgatatcaataatacaattagcggtactaccatccgaataacataaaatatttctccaggaactgaaattcctaatgtatctggacttagtgtatacatatgagctatatgttgcaaatgtactatgaagtaagcaaccaatagtaaactatagcttagtataaattttacttttaaatcaccctttttttgtctccaaaataatagaaataggatccctaagaatatcattcttatgatagtcgacggcgaaaaaggaaatatatttgttactggtggcacataaaaaaagtatatatctagaaatggttgaattagaatgaaccaaaacaagcccttttttattttattcactgaaaactcctccgtattaaatactagctattcttttttagaaatatcttcttttatctgtgtagttgaaatacctgaagttcttggaagatacacaacttcacattgtgtttttaggaagtcgaattgccctttccaatcatctcccataacaaatgtatcaacattatattttttgatatccgtaactttctgatcccaatcttcttcgggaataatttcatctacgtacttaattgcttctaaaatatatttacgatgctcatagctatgataggcttccttatgtttaatggcattaaactcatctgtggataatccaacaattaaataatctccgagtgattttgcacgttgtaataatctaatatgcccccaatgcaaaaggtcaaatgtcccatacgtaataatttttttcactactacacctcttatttagatagaatatttattattatatcaaatatacccgagagtatacagaatgcctaaacaatcttaatattcactcaacttaattgtagaaaaacaacgttttgcactattatttagttaattaaataaatcgaactataaatgcctaatttacttttctatgcatccgataatattctaccattttataaggtagattgtaaaattaatccgaacgctgttcggacaaaaaagatcagcttcctttaaaatggtgtttaccacaaacccatcttttaggagctgatcttttgtctagtataacctattccgaacgaattaaaatcgaaaccttttgtgaactagggctgtccaatatccaaatgggcgttcggctgaaccgatcaccgtcaacaatttcttatgaattatctcgatgtcaaccttatcaggctgaattagcacaaacagatgccgaatacaagcgatcacgatgtggtcggaaaactaagctgagcgatgagttaaagcaaaaaattctcaaccatttacgtctaagctggtcaccaggaatgattgctcacgaatttaaactagctactaaatctatttataattggctaaatcaggggagaattggtttctccttgaatgatctacctgaacatggcgtacgccaacggcgtaacgttgaccaacgatccaaatataatcaatctttggggcgatcaattgaacagcgtcccatgatgattaatcaacgtaagcgcatcggcgattttgaactagatacagtcgttggtcctcgtgggcatagtaaggcagttttattaactttaatcgatcgcaaatcacggttcctttgggcataccggttaaaagatcggacgacagcgactgttaatgaagcactaactaagttcctaaccacttttaatggtccggtgcacagctttactgtggaccgtggcactgagtttagtgggctagtatcacttgaatcacaatatggtattaagacctattactgccatgcttatactccagctgaacgtggtagtaatgaacgctttaatcggaattgacgttatttttatcctaaagggactcgttttgagcacattagtgctcaagatttaacgacgacgttactccaaattaaccagcgaccgcttaaaatactcgactggcaaacaccgtatcaggttatgctgacaaatttgtccaaaaattcggattaaatttgcaatctaccattctttaaagttcacggacttattcctccaagattaatgattcaaaatatattgatagaacgtattggctttttcttgattttcctttgaaaacttgttcgttaatttatgcatgcttgataatgccgttatttcttgatagcgttgctcatcaaattgttcgaacaacaccttccccataaggttcggttcaacgttactcaaccgtggtaactttgcgtattccgcagttaagtgatcacaagcaattgttaaaaagacatgaaaaataaaataattatctaacgtatcatgtgtctgccaataattatataataaatctcgcgttaatactaagatagggtggttagtgtcactatgaatgaaccaactcgaagcagcaattgcccgattttgttgttgtgtattgctgtagaaaaagagtggtgcatcaaaaacataacccgggaaattagtccccgtaaaataaactgtactatcaatccaagtgccaccatgtttcgttaacagcgccacccgtactagatcggataggtgcgcataaggaatcaacctcgcatcaattttagcctgcaggaatgttggaaaggtaataaagtcgcttaaatttgctaacgttatgatttgcacctgttgtttgggatatagtctcttaatcgtttcgatattgtgtctgactaatggtggtgcatcttcaatgccttggaaccaacaaatccaaatgatgttattttttcgctgtttgtcggttgtacttgatattgatcaagaaatgctctggcttctttttttaacttgacatacgttaaggcatctgcaactggcgtttgcttattctttaagtagaagttaataaagcttggagaaagtagggtcgtcacataattcaatctcttttttagattcattttatcccgcctatttattttgactatcaacttttaaaacttgagaaaacatttctgcgttactattcgtattcttttcaattaagcgccacttagcatatggaactaacttgccccctatggttttaatcttataataccctctgtaactactatcagtagcctgtggatgaactgcccaataatattgattatacggtacttctagatataaacgataatctttaggtgtgttatgtttttcctgataggttataaaatcatttttgatacgactcgcatgcccaattcgtgttgctaagcccgcataaaagataacaaccattaccatcattattctgataattggtaagctaaatttaacagcattcaattcgttgcataaggcaactactagcaaacacaaacagaaataacttgcaaacgctcctcgagggccaaacggtgtaactacaaagaatggcacaattaaaacaatagcagctgcaattaatgcaatatattcgatattgtgggtttccagtgataacttagccatttcaattacaattactaataagaataaaattgataataaacatgatactaaatagcgatggccgaaatcctttaaaaaggtattaaacaaaatataatgatattctatgaaagcaatcaggatactcaattctagataagaaaccacagtccccaacttattacccgaacgcttttggagatttttaataattaagtaacccagaatgacagcaagcaacactgtaataattggattatcaatcaagagataaaaatccatttgttgtgaaataatatgataaaccttagtcaatgaaaaacttgtttcccggtaactgtcatgatgtaataatatatttaaataagctttattggaaaacattaaaatgccaccaatatatgtgccaatgaaattagcaattactaagtagtttttctttttttggtatagcatatagcccattaaaattgtggcaactgctaaatttaacagtgtaacgtgttcaacaaaaaagcaactgattattgaaagaaccgctattaaaatactataacgtaaatactttgatgcttgccaatcagaatagtgatacttcactaagttaataataattaagggatataccaatgaagccatatagttaaagaagccggcattccaccctaaaacttgcgcaaacaactctgtactcatcgttaacatcaaaataagaattaataacgtatttctttctaattgcctaacgttgttaatcaaatgggcagccagatagacaactagtgttgtaatacctgcgtaacttaaaaccttaaataccgcactatgactagcaatgataattaaactattaccagcgtaacgtccatcataatttaagaactgacctgatccaaaataattttttaaagtcgttatcccccagtttaaatcatctccagtcaacggaaagttaattgatagataaccaaagaaaataaaaaccagaaaaaagaaaccatatttttttattgcctcattgttacgaactgtcattttaaagcgtcctttcgattaataaacatagataataaagtcgtcttagaatcctaccttattactatatcctcttttagagtctttttatcatttgcttgccttgagtggatcttttcatagacagtgacccaacctatggcagctaacataataaatgccgggacaatgaaaaatcgatatctagactgaatctcaattaataaatggaccataaaataaccgatgatcatcaattttaataaataaccgtccgtccatgtttcacgccatttgaatactgctaataaggcatttgctacaataaaaatatagaacaaaaactgaaccgcattcaaccaatttttaatctttaaagataacttaacattatctgccatcccccacattagggcatcatcccgagcagtccacatcttcttacttttattgaacattaaattaacgagcttaggtttatcttggattctttccttaataatctctttgcccatcttatctcgttttgcgccaagtggataccgattcattaagcttaagtccgttgcagagtagctcccaacggtttcatcattcaaccctaatacaaatttccaagttggatttctattttccagcggatatacggataaatgcgttacttgcaaagcgctattcactaagaacaacatgagaaaataggccaaaacactagtggtaactcttccgagtaattttaaaatatttttccgatccggtgccaataaccattttgtaatttcaaaacagacaagtgcaataatcaacaaaatgcccaatgggcgcatcatattcccgagtgctaataaaacaccagcagttgctttaacccataattgatcatgctttaagtatagatagattgctaaataaattaaaaaagttgctagaaattgattcgttaaaacacctgtcatataaatatacgctggataaaatagcaataacgtatacacaatgcgccctgttatttctttaaagtgtaggttaataatcttatacccaacaaatgcaattccgcaatttagaaggatgttaattatctgtagaataagcacattttgaccaaatattttgatgatcaatgcttgaaaataaacaaagcctaactgataaggccaactttgaaagtaactttcctttagaaatgagaggtcaccttgcgtcgctagtatcgcggcatgatgcatcatttgaaaatcagaactcggtgctgtcgggaccttaatcaaccaaccaattctgactaatatcgccattcccgttacaatcataaaaaatatttttttactggttatcttggccaataaaaccaatgccaagataattaatatgtaatagacaatagcaacaatcattaatttagaattagataggtaattaccggtgactaaattactgattgagtaatacgtaataaaagcaaaaatgcttaccaaaagtactgtataaacaccctttacaaagccgttcataaatttttgcatcaaagatacctcctaaacataatatttttaattttatcacatattagttcaataatattaaatatcccgttattcttagtattttcacttagattgtcttttaaagaattaacttcaatttcgatattaaaaaagcttcaagaagagataatcacaatgtgaattatgtcttcttgaagctttttattaaattttattgcacgccgtattgaatatcatgcacaaattgcgcacggctaacgcccatttgggctaagtagccgtagggatccacatgatcaacttcacgataagaatatgaaatccatttatgcgtcttaacaccattaccacttgcatctaattgcttagaaacacctgcttcatcagccaatagtcttaacaaccagatataagctttgtaatctttttggaatttagctttattgttagttcttgctaattcaacttgtgcgaaggccttgctgttacctgtaggaccacaaccccagctcatttcgccaacaggtgctgtttgaacgattcgaccaccatcaccgacccaatgtgtcacataagcacttgtccagttgttttgcatataagtgattgcgtgttctaaagcatctggatctgtttctgaaccaacactcccagattcatgcgctacgataaattgtcctgaggtttcattatgtggcaaaccagcgatatatcgttgttcaacatgaaaagcgcgttgtgctgtatcgctagccttaacaaattcattaccaccaactgcataccaaacggttcctgttttatcagtcaacttttgtgaaacgtgccattcactattaacagccaacttcttaactttttgacctcttgagttaattgtttcagcacctgatttattgataatgacaacagaatcgttcattggttcagtgtcttactaaagatattttcgccttcgattaatacgtcagcagctgcgatatattgtttatccgctacttgataccaataatcaccaaagatatcttgtgctttcttactgatactccatcttgttaagttggctaaattccgagaactcttaccattaacgtcgattaagtctgttcctttagtattgataactgtcccgattgctctatagtcagcacttgaaacaattaacggatcaccaacgctgtaaacatcttttttagcaatgtattgcttgtctgccacttgataccagatagcaccactactgtctttagccgtttgatgtgttcgccagcctgatttaaagcctaatgtccgaccaaatgtgccatcagtattcatgatacgtgcaccattgtgatttttaacttggattacttggttactaattgttttggtgtctgttagaacgtcagcctttttaaacttaacttcacttgctttaaggtagttttcgttcccaactttataccattggtctccaaagatatcaaccgcaatagctgatactttccaagccgaaccattatttaattttcttaaagcagctttgtgagaattaattaactcactcccacctactttattaaccgttgcaacccctcttagtggttgttcactcgtaaagtaggttgtaccttcaacatagacatcttttgatgaaataaattgaccacccgcgacttggtaccaagcaacaccactagcatcatagacaacgtaacttgtccgccaagctgattgataaggtagtacacggcctttttgaccgtcactattgatgatcatgctgcctttagtattcttgatataaatgactgtcttcggaattgttttgccacctgtaaaaacattttgagccattgtaacgtcttctgcttttacgtagcgccatcagttgacactctataccaaacatccccaaacacatcaatcatcttataagaaatgtgccaagctgtttgatacttaagcgtttgtgcagtttggtcaaggctattagtgacaactgttcccttagtattcttaacagttgcaacaccgtcataagcactaccactaacaaagaacgtagcgccagaaaggtaactatccgttccctttacgtactgattatttgcgacctgataccatgtttcccctgtactatcaacggcttttttagaaacacgccaagctgttttgaaatctagtgtccgggtatattgaccagtcgcattatctaaaattttagtcccttggtgattcttaattgtaatcacaccatgaaaatccgtcgcattcgttaatttcaaactagctgctgtggctttttcagcactcacaggcgcagctgattcagctttactgctgctttgattgttagttgtttgtggttgttcactagcagaggattgtggcgctttactttcttgaacgctagccacactgctactttggctactcatttgactactacttgcaacattaggtgtagcaacacttgtattttgtgctgtgctttcagttgcactagtagtttcagcaaaggcgggtgtattaatcaatatttgtgacaataccactgaagagattgttaaattcttaagtaatcgactctttttcaaaattattctcccaatttccaatcaatcatcccatcattataatgcgatttatctttaaattttaaagttaccgtttggtcgttagaacttttcttagaaacatgaatcgtttgttcaacctttacccagtcaggtccctctgaaacgatactataagtccctttattagtcataccactcgctgatgaaacttgttttaaagtaccgtcatcgcgatatgtcattttagtatcttcacttgcccaagtacctactaaagagtacttaaacttctgatcagattccttgacactggtttgctttttactacttgtgctagactttgcctttttaacaacacttgtcttagtcttatccgatgtatcacgactcttatcgtggccgttattacaccccgctaagactagtaaacagatgctacttgtcattgcatacactatttttttcacagtatccccccagaaatataatcattctttacgattttaacacaaataatttgacaattatataaaccacctttactttttcttaaataaataatacgtaaaagcatgctcatcaaactgactatgttgtgctattttccgataattcgacagtacattatcagcaacaccctgacgataatcctggttaattggtaatcttaatacaacaaaattaactttcttttgtgtaattagtctattctgagtatccaatatttcaggtaactgatcgtgtggaatattgttagtcataaagtacttagtcgtcggtaagacaccgctcgctcggtagaagcccatatctaaatttcggtaattcaataacgtctgatcatgactcttattgatgatttcagcaaaattttgttgtgctgtttgataaacattagttttttcaccgtttttatcaatatgaacggtttgattgttggggaatatccttgattcattaatatttgtattgctgccgataaccatcattaagcctaaacagcccagaaatacacaaataggtaaaggcaattcttcaattttatgactggctaccttaataagatagattaatggcaataccataaaagccattagcggcaacatcacatagcccaaccttagccccagtaaaacagtcacaaccattgaaatataaactgtacagtaaataaatttaatatatacatcttcaaaaagaccattactaactaagataacgaccaaaccaataatgagcataccgtataacaaccaagacttattgactgtttgcatgtaataaacgacactcgcaatcattttatgaacgatatcaacatgtttcccatcgtataaattcgtattagcatagaaataattaaaatataaatcatatagtgcattctgcgatttaaagtagagtaaaacgattgctgaaatcccgacactccccaatagaatcattgaccaactctgccacaatgcacgccatttccgttgcattatcaaactaattgataatgctaagaagaatcctagataaccaccaattaacgtgtacttagcccataaaacgcacccaaataacatcccactcattaaataatctaatttacttaattcaaaattctgatgtgccaatttaaccaataaataaaagagatagattgtcgtaggcatcattaattcttcaacgctcccccccttactaaaggttggcgacataaataaaagacttggcacaataatcacactcagtaatgcatgtgtctttttcgaataataccgtgcaatcttataaatcagcaataatgaacaacaaaacaatactgattcaatcaaataaaccccaaagtaagatttggcagtaatcaaatctgctaatagatagattagatataaaaccggccctttttgctcaaagagatctttatatggtattagtccatgatgccagcccttaccgaccgttaaaaaacaatttaaatccacccaatcattttgataatatagcggtgatgattttgtcacaaataacatgaccaataatgaataggctaatataaaaataatcggccagttcttctttacataatggcgcattgttttccccactcccataaaataaaggccctagaatttttaacatctacagcctttattgattttcgaaaaactaatcacttactttttcgtgtaatcgataatattcaacttttttcagattatcataagtcttcttatctttaccagttaaagatttaacatatttattgccaactttatacttattttcaccgataacactaattttgttctcagtattttgtaagtattgcatgtatgaatcgcctttaaggtctgcttgtttaaagaattctggtaataggtacattggtgagaagtccttaccttgcccaacaaaatcattctttaagacttttttagcacctttattggcccacataacatacggcgtttgataataattttgataaccctgagcagttcccaagtttaaatcgatattcaacattttataaacactattttgttcccccaaccaaggattgtgatccccgtagaacataataacggttggtttatcattcttaaatgagttcgttaactcttcaattgcttcactcgtcttattaattcctgctaaataattgttaataatcgcataatcagcttgattatagccatcttgccattttaataatggtgttccggtatatttatttgcatatggcccatgattttgataggtcactgacaagttaaagtaaggtttcttactcttttctgagaagctatgaattgatttgaagaaggtcttgtccggtacaacaaattgattgtacttattatagtaattttccatatatttaaaatcagaaatacctaagaccggatcaacatttcttcgattgtaaaaccaaccatacattggatgtagggcttgggtttgatagccttgattcttgaaataccaagcaaacgagtctgtattgtggttaaagttttgcaatttactataacccgtaaccgtctttctttcggtatcaattgtcccacccgcaaagatgttcgttactaaatgtccagatatcgattctttttcaacattcttcaaacctgcataaaccgatggatcgatttctaattgtggatacttagaaaaatcgttataggcctccatcattatcataacaacgttaactttctttttatcaggaatgttctgtgatttatattgatctaataatgcctttgcttctgctttattatagccttctggtttagatacgcctgtgctttcaatactgtgtgcaaaagcgtacgggaaaccacgtgtcatatactgactggtagccttccaaatattaccgtacttaacataggctgccttaccgtacgtatctgggttaaatagctcacttttcccccacgtaaaggttaatagcagcaccaaaaataagccaactattctaaattggaatttcatgactggtttaaagtagtttcgtaacataattaaaaccgctatgaagagtaaaaccagtacaacatgcttccaagttaattgaatggcatatttttgtgacattttagaagcttcagaaacaagttgtaaatctgcaaattgaacagcatcatctctaaacattaatttataatgattagcaatgcctaaaccgacaaatatcaaggcatttaaccctgttcctaaccaaatacgtcccaataagaaatagagcgttaatcccatcaatatcggtgctagacaatttaacatcaacagatggctatccatcaaaacgtccttaaccattgggaaagagtacttgtaccccccaacgataactgatgccatcccgataaagatactaataccaacgactaacatcatttgaacgaaccaatacagtagcatattcgtcactgttttaaatgcaataccattattaaacacaacatatttatttttaaatttaccatttttgaagataaaagataaatcaccgaaataagtttttccggttgaatcttgcttacttactgctgacgttggtgtccattttccttcttgatcaactgctaaaccgtctatttttacacgaccagagtcgataacttctctgggaatgaacagactcatcaagaactcgggaatttggccaacaattgccttctgcctactatcactcaataagataagattttttaccttaaatcgatttttaaagcgatctaactcgtctgatgttatatgtactttatctaaaaaacgccaataattctgaaaataacgctcttttttctgaattctaagtactaacaataagcttagatagaaatggtagaaaccaacataccataattttctaatatgtcgtcgaaccataaatctagtgaaagctttatccaatgctttactttgaaaaacattttcccattaataaatatccattcaaactctctcctttacatacctattaatattacatctacaatatctgatatacaatatgcaaacaaaaaaggaagacgacagcagatttattatctactgtcgtcttcctttttagcagcctatctttccaaataaaattcaaatcgttcgcccacgtattgtgtgcggacgtattcaaatggtgtgccgtcgttcaagaaggatacctggcgcaagcgtaagattgagccgttgcgcttgatgtccaagtattcggcaatgcgttctgaggcgagttgcgctgaaacggtttgttgcgcgccacccatttggtagccacctttttcttccagcgtcttataaaaagagctagtgatttcagctttactgaaatcagcgactaatgattgtggcactgtggccacttcaaaacaaatggggacattatccgcgtaacgaatccgttccatccgcagcacttgttcaccgtcttttagttggagcttttcagcttcacttaatgatgggttagcaatgtgaaaagaaatcgtcttgctagatggcgtcttgccttgggccgtcattaaatctgtaaaactggttactccggacattttttcttggacttttcggttagcaacgtaggttccggcaccaatccgacgttccaaaatgccttcatcaaccagcgtttggacggcttgtctaagcgtcatccgcgagacttcaaagtttaatgcgagttcacgttctgaaggaatccgatccccaatcgaccacttgccggcttcaatatcttttttaagttgattatgaatttgaatataaacaggtgattccatgggtcacactcctattgattaatgttggtaaccttggccgaagctgtaagttgccactaagttttgttgttggtctaagatgtttaaatcagcatcgcggccaacttctaatttacctttttgtgttaagccaaattcttcagcttggttaacacttgacatcataacggcttcaaatttatcacagcccgtgaaggtttggatattcttgaaggcatcgatgtaagtcaagacagaaccagctaatgtgccgtcttctaaacgtgcttgtttgtctttaacgattactttttgaccgcctaattcactttcgccttcagcaatccctttggcacgcattgagtcggttactaaatcgatacgttctgcacctttttgttcatatgctaatttaatcatatctggcacgatatggaaaccgtctgcgatcaattcagcatacatattgtcttctaacattgcgtgacctgttacaccaggttcgcggtgcttgaattcacgttgggcattgtataaatgtgtgacgtgagttgctttactttcaatcatttgctcccgtgtggcattactatgaccaacagaaggcacgatgttatgtgctaaacaatagtcttcgaaggcttttgaaccaggatcttctggtgcgtaagtaattaaacgaacgcgattgcctgataatttgttccattcgtctaataagtcaacgtctggatctttgataaattgttcaggttgggcacccttaaagattggggtgataaatgggccttctagatggacaccttggattaatgggttcttttcagcagcgtctttaacaccacgcatggcgttggcaatattttcatttgattgcgtcattgttgttgcaaataaagttgtgacaccttcgttttgcatcatcttcgttgccatttcgtcgatttggttagcatcgccatccattgcatcgaaaccgtaaccaccatgacagtgaacgtcgatgaagccaggaatgatagtttgacctttcatatcttggatttcttcgccagcttgtgctttgtagtcaaacattgggccaacagctaaaatctgtttgtcaaaacgaatatagccgtcttcaataacgtcatcaccagtatagattactgcatgttttaaaactttgattgtcattatccatccacctctattattaaattacttccagtataaatggtatagaccaaaaatgcaagccactcggcgtgatctttgaaccgttttcttaaaaatttggtatactgtccttatcaactactgtgaggagttttaagcatgctaaatattggggttatcggtttagggaacatcgcgcaaaaagcttatttgccagtgatggcacaattacaagatcaagttaactgggttttatgttctcgtcagcctactaagcttgcacaattacaggcccaatatcactttagcgatggttgcctttcttttgaggccctcttggcaaaatcattggatgccgtttttatccatacacctactaatacccattatacacttgttaagcaagcactctcacatggattacacgtttttgttgataaaccgctcagcgagaacccactggaagtcgctgaactctataaattagccgcacaacaaggcctattattaaccgtgggtttcaaccgtcgttttgtgccgcaattacaaaaattaaaaagcatccctaacaagcaactgattaacgttacgaaaacacgcgttgatacacggcaaccagccgcttttgcgatttacgatttaatgattcatactattaatacagccctttatttagccaatgacgttggtttgagctataacgtgcaaacgtattgtaaacaggatgccaaccaacaattacaagtcgcccaattgaccgttgaaacggccagccaactcatcactgcgacgttaaatatgcaaggcggcactaaccaagaaatcgctagtcttcaaagtccgcacggcttgttcaccgtggataacctgacacaatataccgccaagacggcaaccgataaccggcaacaacaacctgcagactgggaaccaacattagttactcgtggctttgacccaatgatcaaggcctttatcacagccttacaaacaaatggtgaaaaccccgtctcacctgccagtagcttattaacacatcagttatgtcatacgatgtgcagacaagcgcaacgtcgttaaaaataggccagaatgtggcgtaaaaaagaggtcgcaacaaaaattacttttgttgcgacctctttttatacttaaacgtgcttttcaaaactggcccctgtaccttgctatgcatcgtaaacaatcgactacgtcggtcactgcaattgctcaaataaccgtcaatgacgcacgctatttgaaatgtgcctccccgaactgccttttccggttaactacaaaatgagcattatggctaaaccctgccataatgctcatttttaggttaatcctcaaagtcaattcgttcgagtccgcacgctatttttggctttccaagtctttttcaattgttgcgtcgatgcctttaaccactgctgacattaaacctgcttcttccattgctaacaagcccgcaacggttgtgccacctggtgatgatactttgtcgattaagtcccatggtgactcgtcactcatcagaacattttgggcgctccctaaaacagcttgggctgcgatttcagtggccgctttcttggttaaaccgtgtttaacaccagcccgtgccattgaatcgatgaataagtaaacaaaagctggtgaactaccagcaagtgcgctgaaagttgtgaagtctttttcaccaatttcaacaacgccacctaattgtgacaagacgtccttcacgctgttcaattgatcagcgctcacttgttcattaccgacaacggctgtgataccagcgcggttagcaacgttaacgttgggcataatccgcaaaataggtagattatccgcgtccacttgttgacttaatttagccaatgaaagaccggctgccattgagaccattaatggttgtttttctttaaaagcagcgcttgtttcttctagaataagtggcacaatatatggtttaaccgccaagaagacaatatcagcttgttcgactaccgcgatgttatctgccactggtgtaatgtgttgttcagccgcaaatgcttcataatttgccggatgagccccgtgaaccaaaatatccgttgttgcgatctgatcggctttaactaagcctttaatcattgcttgtgccatattaccgacaccaataaaaccaattttcattctgccacccctttttgtattgaaccaagaataccgaaagaaagtgttgaagtcaattagcaccttatctatcctaaaaaagcgtccggcaaaattgacttttgtcggacgctttctcatttaaaatcgtgctaaagttttggctgatgcctgcgacgttttaaccaattcgcccacaaccactgttcgctcgtaagtctgaccgttgactatctcgccatcaggatcacaggtgtacaaagttactaggcgtttttgacggacatcatccaaaatggctacttggttggccttaaccgttttgcgacggatgacacgataggtataaacctgcatcgtatcggtcaaataaatcgcggcgcccactttcgtttgactaagtggtgaaaacaaaacattttcctgggcaatatcgtgactactcaaaacatagttccgcttgcccattgtctgtccctgtttattggtaaccgccgcctttagcatattatcgtgcccgttggtttgaccaatgcctttgataatcggcaatttaatacccactgagggaattgccaacttaccaaccgtaatcccccgcgtatcttcatcccaataagttggttgcggtgcattatcgtccgccgtctttttcgtctgaactggtcgcactttgacggttcgtgctcgggcgatattttgcgttaactgatcatgccgatacttttgaacacccatcaagcctagaaaaagacaaagtgatactataaaaagccaacgaacccatttcgctgcagggtgcttttattgtccttttatctaaaaaaacttatcgacgaattactaacatttgatgctgacgaggcaaacgaaatcagtgaattactattattacttgttagacgaatgaaataaataacaaaaaagctggtgaaaattaattcatcggccttttttgttacctattatcttctctcaaaaccactctttaaattaatactctcccttggctatacatgggcccatgaagtttataaggcacacgacggactattagtcggatttcctttaacctcttcagattcgagttctggggcttacctgaagcgcgattaaatcatcttttttaccttaaaactcagaactgctatcaataatccgcgcacgcttattctataaatgaataaagcgtgtttttttagtcacaaaaaaacgcaccgacaattgtcggtgcgcttacctaatatattattgggctagctggattcgaaccagcgcatgacaggatcaaaacctgttgccttaccgcttggccatagcccaatcaagtggaggagagtggattcgaaccaccgaacccgaaggagcggatttacagtccgccgcgtttagccacttcgctactcctccatatgtctgtctcatcgattcaactatattagtttacaaaatttccagacaaaaatcaaccctaaaatgcaaaaaaaacctcgattattgtataaataaccaagatttcttttaattaatttagtcaacgccttccattaacttatgaattggtttcacgaagaaaattaagacgatcccgaagatcgcactaacgatcccgatgcctaagaagtatttaatttcagtttgtggtgagtataaacgaactaactgtgcgttgaccgcttgaccagcagcatcagctaagaaccacatactcatcatctgtgattggaatgcttttggtgctaatttagttgttattgaaagaccgattggtgaaatcaacatttcagcaatttcaacaatcacccatgagccgattaaccaaaatgggctaacacgtccagcagtcccatgtaataagccaggaagcgccatgaacatgtatgaaagaccagcgaagattaagccaacagcaaatttaccaggtgctgagggttgcttcttccatgaactccacaaccaaacgaagaacggtgttaatagcataatgaataatggattaagtgattggaaccatgaagcagccaaattaaaatgaccaatgtgtaaaactgtacgatcttcagcaaacaatgccaagacaactgaacctgattcttcaataccccagaaaacagcggcagcgatgaagagtggaatataagctaaaacgcgtgaacgttcttttttagtcactttttgacttgctaacatccgatagaaatagataattggtaaagcaatcgcaacgattgaaattgccaaaacgatattttcaatgtttaaatgacctgtaaattgcattgctaaaacaataattacgattgcgataataccaagtacaattctgcgaattacacttgttaattcttctgcagcgatcggatcattaggacgcgcattttctttattaaattgtgaacgaccacgataatattgaattaacccgaagaacatcccaacggcagctagtgagaaccctaagtggaaattcatctgtaagccgacggtcccaacaatcaatggtgcgacaaatgatcccaagttaatcccgaagacgaacatactgaacccagcatctcgacgacgatcatcttcactgtataagctaccaaccatttcagaaacgtttggtttcaataacccagttccggcaacaatcaagccgattgaaataaataaagcagttgcgcccatcggtaccgctagtacgatatggcccaacataataaggaccccaccgatgaagacggtcttaaagctaccccagattcgatcactcaaccaaccaccagcaacactggctaaataaaccatcgaaccatagatcgccatcactgacatcgcagtcgtcttgtcaaaaccaagaccacccttatctaaagcaaaatacatatagaatagtaaaattgcacgcatcccgtaataactgaatcgttcccacatttctgtgaagaataatgtcgataggccgtgcggttggccaaagaatgtcttttcatgtttctcttccattgtaataccccactttaaaactttattatttttgaaactaggaattgacagctgttaagatagggacttcaatggttgaaatcggcactatacaagaactctcttatcattcgcttagaatctataaatgacattataatcttattttaatgttaaagcaattcttttttttatttttatgcactttacgatcaattttcaaatcatttttcacttatttcctctagaaatttaatgattaatattagccactttcagctattttcagacaccattttctcagcaaataaaggcgcattaatgttaaattattgcattcattattattacgatgactatagtctgatttaagtatcaaacacacctccaacctttgtagtacaatgattagatagaaagtaggtcgaacattatggcgcaactcaaattagtgacacttaagaaattattagcggatcggtggcttaattattatgaagcaacttatcaaaattctaaacaagaagagattaattatcattttgtcagtcgtgaagccaatctaacaactgacaaccttaaacatcctgtgacggcttctgcggtcaccatgttttgccttaatcgtgatcatagtcaagtcttattactacgtcaattcaggctccctctcaacgactatgtctatggtaattcagctggtttaattgaacctggtgaaacagtcgaacaagccattgaacgtgaactcgtcgaagaaacaggctatcaaggtgttcatattgatcaaatctttaatcctagctattctacgccgggcattacagatggcgccatcactttagccatctgtacaattgatcaaatcccttctcaaaatacggttttagaatccgctgaagaattgactagcatttgggttgataaaaaacaagctgctgaaatattagcaagcggtaagatatcaggccgaacacaactgctattatggcaatgggttaataatcgcttaaactaaaataagacattgtttccatttggaagcaacgtctcattttttatcctattaagcggtaataaaaaagcactgttagtcttaacgactgacaatgcttaacaagaatcacatgcataacacttagtgccggctgcaggagtcgaacctgtgaccctcggtttacgataccgatgctctaccaactgagctaagccggcataaagatgacccgtacgggatttgaacccatgataccgccgtgaaagggcggtgtcttaaccacttgaccaacgggccgaaaataaaaaacgattgaagggtctcaaccgctcattttattactccggttgtcaggctcgaactgacgacatcatgattaacagtcatgcgctctaccaactgagctaaaccggaatcaagcgtggcaacgtcctatcctcgcaggtagtttcccaccaactactatcggcgctaagaagcttaactactgtgttcgacatgggaacaggtgtatccttcttgctatcgccaccacactattttgtgcttgcgcactgagaagaacttcgttctctcaaaactgcataataagtaatatttcatttcaaaagccaaacattgcacctttggttaagtcctcgaccgattagtactagtccgctccatacatcgctgtacttccactcctagcctatctacctgatcatctttcaggggtcttacttccataaaggaatgggaaatctcatctcgaggggggcttcacacttagatgctttcagcgtttatccctgccatacatagctacccagcgatgcgcctggcggcacaactggtacaccagaggtatgtccatcccggtcctctcgtactaaggacagctcctctcaaatttcctgcgcccgcgacggatagggaccgaactgtctcacgacgttctgaacccagctcgcgtaccgctttaatgggcgaacagcccaacccttgggaccgactacagccccaggatgcgatgagccgacatcgaggtgccaaacctccccgtcgatgtggactcttgggggagataagcctgttatccccagggtagcttttatccgttgagcgatggcccttccatacggaaccaccggatcactaagtccgactttcgtccctgctcgatttgtcaatctcacagtcaagctctcttatacctttacactctacgaatgatttccaaccattctgagagaacctttgagcgcctccgttacactttaggaggcgaccgccccagtcaaactgcccacctgacactgtctcccgccacgctaagtggcgcgggttagagtggtcatacagttagggtagtatcccaccaacgcctcaatcgaaactagcgttccgatttctacggctcctacctatcctgtacaaactgtacaaacactcaatatcaagctacagtaaagctccatggggtctttccgtcctgtcgcgggtaacccgcatcttcacgggtattataatttcaccgagtctctcgttgagacagtgcccaaatcattacgcctttcgtgcgggtcggaacttacccgacaaggaatttcgctaccttaggaccgttatagttacggccgccgtttactggggcttcaattctgggcttcgcttgcgctaactcatcctcttaaccttccagcaccgggcaggcgtcagcccctatacgtcatcttacgattttgcagagacctgtgtttttgataaacagttgtttgggcctattcactgcggctgacctgacggtcagcaccccttctcccgaagttacggggtcattttgccgagttccttaacgagagttcactcgctcaccttaggatattctcctcgaccacctgtgtcggtttacggtacgggtagtttatttctcactagaagcttttcttggcagtgtaacatcaggaacttcgctacttaatttcgctccccatcacaacttgtccttaaagaatcaagcatttcactcaactcaagacttgttgcttggacacacatttccagtcgtgtgcattccttagcttcctgcgtccctccatcattcaaacaaaataaactagtacaggaatatcaacctgttatccatcgactacgcctctcggcctcgccttaggtcccgactaaccctgggaggacgagccttccccaggaaaccttagtcatacggtggatcagattctcactgatctttcgctactcatgccggcattctcacttctaagcgctccactagtccttacgatctagcttcatcgcccttagaacgctctcctaccgcggacacttacgtgtccacccacagtttcggtattatgtttagccccggtacattttcggcgcagcggcactcgactagtgagctattacgcactctttaaatggtggctgcttctgagccaacatcctagttgtctgtgcaccgccacatccttttccacttaacataaattttgggaccttaactggtgatctgggctgtttccctttcgactacggatcttatcactcgcagtctgactcccggaactaaatcaatggtattcggagtttatctgaattcagtaacccatgacgggcccctagtccaaacagtgctctacctccatgatccaatattccgaggctagccctaaagctatttcggagagaaccagctatctccaagttcgattggaatttcaccgctacccacacctcatccccgccattttcaactgacgtgggttcggtcctccagtgtgttttaccacaccttcaacctggacatgggtaggtcacttggtttcgggtctacatctatatactcactcgcccatttcagactcgctttcgctacggctccagcttttcactttaacctcgcatataaacgtaactcgccggttcattctacaaaaggcacgccatcactcattaacgagctttgactaattgtaggcacatggtttcaggatctatttcactccccttccggggtgcttttcacctttccctcacggtactggttcactatcggtcactagggagtatttagccttgggagatggtcctcccggattccgacggaatttcacgtgttccgccgtactcaggatccagaacggaggtcaagttgtttaatctacgtggttatcacactctttgactcagcttcccagctgattcgattacaacttaacttggtaactccaaagttctgtcctacaaccccaagaagcaagcttcttggtttgggctcttccccgttcgctcgccgctacttagggaatcgatttttctttctcttcctgaaggtacttagatgtttcagttcccctcgtctaccttcattaaactatgtattcacttaatgataatactcgattaaaagtattgggttcccccattcggaaatctccggatcaaagcttacttacagctccccgaagcatatcggtgttagtaccgtccttcatcggctcctagtgccaaggcatccaccatgcgccctttataacttaacctatctttacctacggtaaagggttattatttgagtttagcgatatgaactaattcatatttctattattaaaaaactctttaaaacgcaatgtttttctcggcttttaaaactaatatattacttattatccagttttcaaagaacaaagtttgagagtagacctctcaaaactaaacaaagttttgatttcgcaaatgtacaaggttttccgtattattccttagaaaggaggtgatccagccgcaggttctcctacggctaccttgttacgacttcaccctaatcatctgtcccaccttagacggctggctccccgaagggttacctcaccggctttgggtgttacaaactctcatggtgtgacgggcggtgtgtacaaggcccgggaacgtattcaccgcggcatgctgatccgcgattactagcgattccggcttcatgtaggcgagttgcagcctacaatccgaactgagaatggttttaagagattagctaaacctcgcggtctcgcaactcgttgtaccatccattgtagcacgtgtgtagcccaggtcataaggggcatgatgatttgacgtcgtccccaccttcctccggtttgtcaccggcagtctcactagagtgcccaactaaatgctggcaactagtaataagggttgcgctcgttgcgggacttaacccaacatctcacgacacgagctgacgacaaccatgcaccacctgtcactttgtccccgaagggaaagctctatctctagagtggtcaaaggatgtcaagacctggtaaggttcttcgcgttgcttcgaattaaaccacatgctccaccgcttgtgcgggcccccgtcaattcctttgagtttcaaccttgcggtcgtactccccaggcggagtgcttaatgcgttagctgcggcactgaagggcggaaaccctccaacacctagcactcatcgtttacggcatggactaccagggtatctaatcctgtttgctacccatgctttcgagcctcagcgtcagttacagaccagacagccgccttcgccactggtgttcttccatatatctacgcatttcaccgctacacatggagttccactgtcctcttctgcactcaagtttcccagtttccgatgcacttcttcggttgagccgaaggctttcacatcagacttaagaaaccgcctgcgctcgctttacgcccaataaatccggacaacgcttgccacctacgtattaccgcggctgctggcacgtagttagccgtggctttctggttggataccgtcactacctgatcagttactatcagatacattcttctccaacaacagagttttacgatccgaaaaccttcttcactcacgcggcgttgctccatcagactttcgtccattgtggaagattccctactgctgcctcccgtaggagtctgggccgtgtctcagtcccagtgtggccgattaccctctcaggtcggctatgcatcacggtcttggtgagcctttacctcaccaactaactaatgcaccgcgggtccatcctaaagtgatagccgaaaccatctttcaaccctacaccatgcggtgttaggttttatgcggtattagcacctgtttccaaatgttatcccccactttagggcaggttacccacgtgttactcacccgtccgccactcactcaaatgtttatcaatcaggagcaagctccttcaatctaaacgagagtgcgttcgacttgcatgtattaggcacgccgccagcgttcgtcctgagccaggatcaaactctcgattaaaagtttgtagctcttgttttgttacttaatttatttgctagcgaaattgacttcgcaaatatgttgtgccccgaagggcgaccctacacatttggtttatcaaaactttgttcagttttcaaagatctactgtgttgaaacagcttaattaatataccatttataacaactgattgtcaagaactttattaatattttttgaataaatattcaaaagcaatttttaatgtttctcgtaatcgttgtggcttttatctcgctgacaacatagactactatatcagctatctaatcattcgtcaactttatttattcatctttatttcagaactttcaacacctaaataatccaatttatccggtattttatgcaaaacatgaacaattatccaaaagcagtctttatatggcggttatcccgaaaattacacaaaaaaaacgccttttcaggcgtttaaaaagttttaaatttcttcattttcttgcttatctggacgcattgttgggaataagaggacatcacggatagaagcagcgtcagttaacaacataacaagacgatcaatcccgataccaagtccacctgtaggcggcattccgtattctaatgcttcgacataatcttcgtcgataccttcagcttcatcattaccattttcacgttccttagcttgtgcttcaaaacgttcacgttgatcgattggatcattcaattcagtaaaggcatttgcatattcgttaccatgcataaagagttcccaacggtctgtaaaacgatcgtcttcggcattcttcttagccaatggtgaaatttccactggatggccgtaaatgaatgttggttgtactaacgtatcttcaacgaattcttcaaagaaggcgttaatgatgtgacccacttgccagtattcttcatacttaacgtggtgttggtctgctaattcacgagcagcttcaactgtcattggttgccagaaatcgacacccgtttcagccttaatagcatctaccatgtgaacgcgggcaaaatcaccatctaagtcaattgcttgaccttgatatgaaatttgaccagttcccaagactttgtgagctgcaaaacggatgataccttctgtttcatccatgacatctttgtaatcaaagtatgcagcgtatgtttctaacatcgtgaattcagggttatgtttggtatcaatcccctcattccggaatacacggccaatttcatagacacgttccatcccaccaacgattagtcgcttcaaatgcaattcaagcgcaatccgtaagtagaggttaatgtctaatgcattgtgatgtgtaataaatggccgtgctgaggccccaccagcttgaccatgcaagacaggtgtttcaacttcagtaaagtcatgtgtatctaaatattcacgaacggcagaaataatcttgctccgttttgtgaaacgatccatactttcaggattagcaatcaaatctaaataacgttgacgataaatttgttcgacattcgttaaaccgtgatacttatcaggtaatgggcgtaatgcctttgacaagaatgttagatgagttgctttaaccgttaactcacccatatcagttttcatgatttgacctgtaatacctaaatgatcccctaaatcggctttcttgaaaattttgtagttatcttcaccgacttcgtctttacgaacataaatttgaatcttacctgaacgatcgcggatatcagcaaaaccaactttacctttaccccgtttagacatcattcgtcctgcaattgttacttcttggtttttaacatccaagtcgtctttttcaattgcttcaaattcttcgtgtagcgctgctgctaaatgcgtccgttcaaaacggctcccaaaaggatcaatgccttcatcctttaaaaattgcattttttcgcgacggaccttaagttggtcattcatttctttttgattatctttttgtgccaactgacaattcctccattactttcaattatctactcttgttgattttaacatgaaactaggcaattaagtatccccttatgccattcttgcttcagtttcttcaacaaaacggtctaaaatgtcgccaaccgcttgttctgtttcaacttcattaactgcagccttcgtcttagcagcgcgaggaatccccttgaggtagtaagcagcttgttgtctgaattcacgacaagcaacgttttcgccctttagttctactaaacgatgcaactggagcttagctgttgcgattttttctcttggtgttggttctgcaatcaattcaccgctgcgcaaataggtttcaacttgacgtaaaatccaagggttccctaaagcagcgcggccaatcatgacagcgtcagcaccaacttcatccaacatgcgtttggcatcttgtggtgtgcggacatccccgttacccataaatggaatcttcaattcagctttgacctgctttaagatatcccagtctgctttaccggtatacatttgtttacgagtccgaccgtgcatggcaagtgctgatgcaccagcgcgttctgcagcaagggcgttttgaacagcaaggatgtgatcttcatcccaaccagtccgcattttaaccgtgaccggttttttaacagcgtccgtcacatatgaaaccatttcgtaaaccttatttggatctaataaccaacgcgcaccagcgtctgtcttcacgactttattcacaggacagcccatgttgatgtcgataatatcagcttgtgtgtgttgatccacaaatttagcagcttccactaatgtatcttttgagccaccaaaaatttggatgctcactggatgttcgtttggatcaacaaacatcatgcccattgtcttttgattattgtgcataatcccgcggtcactaatcatttcacagacgactaagcctgcgccaaattcctttgcagtcactcgaaatgctgcgtttgtaataccagccattggtgcgacgactacttgatttggaatcgtcacgtctcctatttgccatgtcataatgccaacccattcccttcgtgtctttcgacaatatccaagctatcatagcaaaaaattatctttcaggcaaaaattccgtcctattgttctgctaagatggctttcaaatctgcttcactaaattgatattgtttgccacagaaccgacatgttgcttcggcaccgtgatcttcttcaattaattgttttaaatcttgaggtgcaattgagctgagcgctttagcaaaccgttccttagaacaatcacattcgtatttaacaggtaattcttccaaagtcttcattggtaattcgccaacaatttcagtgatgatttcttctggtgtcatcccctgttgcaatagttctgacacaagtggcatttcttgaagacgcgcttctagaatatcaatcaagcgatcatctgctccgggtaagatttgaatcataaaaccaccggcaacgccgattgtgctatcttcgttcacaaatactgacacgccaaccgctgatggtgtttgttctgattttgctaagtagtacgtaaagtcttcacctaattcaccagaaaccaatggtacttgcccagtaaagggttccttaaggccaagatccttagtgacgcttaacgtccccgttgtcccgacgccggctttaacgtcaatcttatttttctcatttgaaggtaagttaacgtgggggttcgtaacataacccttaaccgtcccttgtgcgttaccgtctactacgatttttccgacaggaccatcaccttcgactttaacagtcatcttagtatcgccttttaaaccagcggcacttaatagtaatgtcccaacaattgtccggccaaaagcggctgatgatgtgggccatgtatcgtgtttttcttgtgcttctgtgataacttgtgtggcgtttacggcataggcccgtaattgaccatcttctgatacttgtttgactaaataatccttcattatgctacctcttttatttattgatacaaaaaggtcgaccactaatcgtgtcgaccttttcgttataaccgattatgcattatcgtttgagtcatcattagttggttttgaatcagcagtatcatccgcaacttctgttgtttctgaatcagcttgttcagcctctaattctgagtcagttttttcagcttctttagcttcaagtgcttttttagcttcttcaaaagtagccgctttttcacttgggaattcttcagcattcttttcaggcatcttaccatcattgaataagcttaagatttctttttcgtttaatgtttcgtacttcaataacatttcagcaatcaacttgtgttgttcacgatgtgcttgaataatttcagttgcttgttgatgtgcttcgtcgattaagcgacgaacttcgctatcaattgcagcagccgttgcttcagaaaaggctgggccttgaccgtaagcagcaccgacgaatggttggccttctttttcaagcgcaactgttcctagtttttcagtcatcccgtaatgggtaaccatgccacgtgcaatatctgttgcttgttcgaaatcgtttgaagcaccggttgattgagagttgaagatgatttcttcagctgtccgaccacccattaaaccagtcatttgttccgttaattctttcttactcatcaagaattgatccgtcttaggtaacatgatggcatatccgccagcacgaccacgaggcacaatcgtgaccttccgaacgacacgtgaatcacttaatactaagccgataattgcatgaccagcttcatgataagccactgtttcacgttctttaggattgatgacacgatcccgtttagcaggaccggcaattacccgatcttcggcttcatcaacatcagaagcatcgatatctttcttactacgacgagctgccacaagggccgcttcgtttaataagttttcaagatcagcaccgacaaaacctggtgtttgttgggcgatttcttttaaatcgacgtcgtctgctaatggtttgttcttcgcatggacttttaagatggcttcacgacccttaacgtctggacgccccacaaggattttccggtcaaaacgacctggacgtaagagggctggatctaagacatctgaacggttagtagcagcgatgacgatgacgccttcgttacctgagaaaccatccatttcaactaacatttgatttaatgtttgttcacgttcatcgtggccgccacccataccggcaccacgttgacgtccaacagcatcaatttcatcaataaagatgattgatggtgctgatttcttagcttgttcgaataaatcacgaacacggctagcaccaacaccgacaaacatttcaacgaaatcagaaccggagattgagaagaacggtacgcccgcttcaccagcaactgctttcgctaataatgttttaccagtacctggaggtccttcgagtaataccccggctggaatccgtgcgcctaatgccgcaaacttacgaggatctttcaagaattcgacaacttcgaccaattcttgtttttcctcttcagcgccagcaacgtcagagaagcgtactttattcgcacccttatccgctttttgcgctttggacttgccaaagttcatcattcggccaccttggccaccgccttgacctgcttgacccatcatcatgtagaataaaccgaacataataattagtggcaagattaggcttaagatgctaacccaccaaccagattgtggttcttgcattgtttcaatctttgttttgttttggttagctaaattcgtaatggcactaacttgtgaatcactttgtaataaagtggttgtaaagtgtgtcactttcttattttttgattgtgaaccaaaaaatgttgacttaggctgttcgtctttttgtgctttacgatattcccctgaaattttataaataccatttgtcggttggattgagaacgacttaactttatccgtcttcaattcacttaaaaaagtacttgattgaacttccttagactctgatccgctattgccattcatgaagaatgaaaatacaccgactaaagccactaggataataatgtaaaacagactattactgaacagtctattcttcttgttgttcatacgtgacctcctgaagcttctcatcatttgtgacactgtgtccttttgacactgttaaactataacatatctgactttcattgaccatttatttacccgaatatatttccggtttcaaaacgccaattgttcccatattacggtaacgttcggcataatctaaaccgtatccaacaacgaattcatttggcacttccatgccaacataatccgaatgaactgggacaactctacgacttggtttgtccattaaagtgcaaactttaatcgaattagcttggcgcgtcttgaggattgacatcaagtaattcaacgtccgaccagtatcgacaatatcttcaacgataataatatcgcgaccttgtacgctggtatcaagatccttgatgattttcacttcgccagatgaaatcgtgccttcaccgtaacttgaaacgtccataaaatcgatttcgacatgcaaatcaatttcccgaattaaatcagtcatgaaaacaatggcaccttttaaaatcccaatcatcaacggatttttgccttcataatccgccgtaatttgcttgcccaatttttcattgacgcgttgtatgtcttctcttgtgtataaaatacgttcgatatcttgttctaacattgagctagcctccattttttagtaaaacctgaatgttctttattcacttatataacacagtacgtaccgtattttaccagtttgttcgtgattaaacaatgctgaaattcgaaattctgggtggccaaccagggtttcttgtgcccagataccccagctattctgccgtttttcatgaggtaccttcaaatcgataaaaagacgtttaagtgttttatggtgggttttatcaatcataattgtatcagttaactggcatggtttggcaacaattggccattgctcatctgctaaccaaattaattgttggcccgatagtttacggggcaaatgattaatctcaaaaataccaatttgttcgttatttggcaagacacaccacttattcagcattagcgttcgacttttttcgtctttcgcggctatctcaccaatagttgtttcaccaatttggaagcgatcatagattttggtaaacaaaatcctctgaccaagggccaactgaccttgtggtttaaccgttgattgaatcaattgcttgagttgttgcagttgggtttcctttagcggactaatttgggggaaatgctgtttgatgatgagttgccagatggctgtttgttgcgctgtaggtagtgttttaatcgccttgagctgtccactaataactttgtctgtaaccttcaaatctagtaatggtaataatgtcgtcgtcaattgcacttgttgccccaataaggctgtcaattgctgactgaagcgattcgcattttgcaagatttgtccattttcttgttttaaaaaagggaccaaagtatggcgcacccgattccgcaagacagtcgtctcatagtttgtctgatcttcaaaggacgtaatgttattggctaacgcaaagtcgcgtaaatcctgcttagcaaatggcaataagggtctaatcaacgtgccgtcagcaaatggccgttgactttgaatcccgcgcatttcgtgcagttcaccactgcgaataaacttcatcatcagtgtttccaactgatcatccccatggtgcgccgtcacgagataatcaaccttttcagcggtcattaagtgttcaaaaaattgatatctaaactctcgagctgccgcctcaatacccgtttgcgggtgttgttgtagcggccaatgcgccacttgcagtgataagtcattttccagacagaattgtcgtagatacgcttcttctgctacactttccgtccgtaactcatggttgacgtgggcgacaatcaattgaggtttaagcgctgtcggtaggcgttgcaaaagcgtcaataaaaccatcgagtcaactcccgttgatgtcgcaacaatcacttttgcgccagttggccaaaactggtggcgccgtatttcgttttgaaaagcttgttcaagcatcttaaccctccttcaaatgaatagaggttgggccaaaagtctattcactaaactttcaacccaacctctatcatgatttttgattaactacgacgaccgccacggcccccacgtttaccttctgtattgcgtttaatagtagacaaacgatcttcactatcttttaagaagcctgatagtaaatcgtcaaagccttccttcttaggcgcacttgtatgttcaggtttacgatacccaccgcgattgttatttggacgactagattgtggccgagtatgctcttgcaccttaggttgatcaaccgcttttcgaattgataatccgatttttccgttttgatctgacatcaccttcacagtcacttcgtccccaactgttaagacatcgtgaatgtccttgatataactatcagaaacttcactgatgtggactaatccggtcttgccttctcctaaatcaacgaaagcgccaaaattcgtaatacctgttaccttaccaggaacttttgaaccaacttcaactgccatataaaactacgtcctcctaaatggtcgtttgaactcgtcaaacttttaatcacaaacttgtgatatttaataaaataagtatagcacgctttacccttgaaacaaggctgtaaaacgaaattatttttgttgttcgtttaaatttggtgccttatcttgaggcaaactatagattgtttcgcccttctttgaataataatatttgtagcgaatatacttggctaagtagtcatcattatgtaactgagagacctgtacttttaaatccgcttctttggctttggccttttttaaggattgttttttaacaactgtttgcttctcaattaatgccagagaatggtgggtttgcaggatttgaacaccacagacactaaaaagaattaacgcgatgacacccaacgctaataagcgacgcttatgaaccgtccgtgtccgtttcgatttttgttcaaccttttgtttagccgcctgctgtttcgtataggcattttcaatttgcgttatcttacgactcacgttagcccctccaatcactggttgtaatccctttattatagcaagttaataaaaacaacgtcaaccaatatcacgaaaataggcgatattagtgattatccttaacaaattggactaaaccactaatatcgcctattaaaagaccttattcaaaattttctgcaaccttagtttcaaggatttcatacatttctgccgcatcgctcttcttggttgtttcgataatttgcgtaatcttgacaatcatggttttgttaccaaacccaatttccaatttatcgccaacaacgacgttacttgaagactttgcttgacgatcattaattaaaatccgacctttatctgcaatttcttttgcaactgaacgtcttttaataatccgtgatacttttaaaaacttatctaatctcattagtgtcgcctacctttttaatttttgtgctagtttcagcaactgtttaccacccggaatcgttaaccattctcgaattgagaataattgccacgctaaagcaaggctgataaagacgggtaccccgactgcaatcccaacgccagcacctaaaacggcttggccccttgagaccagactaggttgaatgacggttaccacaaagcggaccgctacagccatgatgccacagatcaaaaccaatttacctgtaaaatgctggccgtccaaggcatctcgcaccaattctggtgattgccgtaagattaaggctaacacaacccctaaactaataacagtcccaacactcgcgcccacaatttggaagtgttgtaccaaccattgattaatgaccactttgaccaaaaggccgattaatagcgcaatcgtcgtcttatggaactgatccaaactctgtaaaacactattgcaggcattgattagcgcaataatgacaatacttagcatgtaccacactaaggctttattcccatctgcatccccaaacaacaagtagttcacttgtggcatgagaatcatcaaaccagtcgttgccgccgccgagaggcctaaactgatatgaatcaatgattcagcgacttgttggaattgatggtcttgctgttgttgccgtgcccgcgaaagacttggaatcaatgtcgatgaaaaagccattgagataactaagcctaattgcacgagcggttggccccggtcaaatatccctttaaggtttttagcaaaatcctcggttaagccactggccactaagccttttttaaccgtgaatgaatcaaccaactgtaataacactattaatgaagcaaacagacaaattgagcccccttctattaataagcgtttagccaatgaacggtacgcacctaggttaatgcccttcggttttgtccctctgagcacgaaggctttttccgccggtttcaataaggcaactgttgctaccaagcctccgaaaaaggcgccggacatcgcccaggttcccatttcataaacggaccagtgtagcttcagtgacaaccaggctgctaggataatgacaaccacccggacaagttgttcggccacttgtgacgtagccgttggaatcatattgaagatgccttggaaataaccccgcgtaaccgccaaaaacggcatcaataagaacatgtatgacaccattctgattaacggtgctaattcagcatccgccattgccaccgcaattgccggtgcttgatattgcaggtataaaaagatcagtgcgccgaataaccctaatagcgcaaaagatcgccgtaaaatctgtgtttgttcagccggggccgtttcctcagccacaattttagagatataaactgggaaaccacttaacgcaaacgtcatcccaatcccatagatagggtaaacttgctgataaacgtaaaacccggtgttgccaaccatattttgaaatgggatccgatagaccgcactcaatattttggcaacaaaggaggcaattgataagacaactgcgcccttcattaaatgttgcatctgtttattttgcatcgaatccctccgataatcgctaccagtaactagcggttattttaccaactgcttcttttcgatttcaacgagtgtttccacaaaaatcgccaactcacgtaaccaatcgccagtcttcatcttaggttggataattaacgtcacacttaatttttcttgttcaaaaccgaccgttgccttcaagcgagttgctgacaaggcttcaaaaatctgttcaccagaaactaagcgactcccttttggtgataagacgacttgaatcttgtctttgacttgtttaatcgtttcgattaacgcatcatcggcattcatttttaattggccaatcgttaagagatgcgcgacttgaacgggataatccccgaagcgatcgattaaatcgctctgaatttccgtaaaggccgcttccgtatccatttggcgaattcgtttgtaaatttcaattttttgccgttgatcattaatataatcatccggcaagtaagcttcgagcttcaaatcaatctcagcgttagtcttagccgccactttcttgccttgtttcttggcgactgcttcgctgagcatttgtgagtataaatcaaacccgactgaatcgataaagccgtgttgttgtttacctaataagttacctgcgcctcgaatcgataaatcacgcatcgcaattttgaagccggaacctaattcagtaaagtctttaatggcctgcagacgcttctcgctgacttcggtcaataccttatccggtttatacataaagtacccgtaagcgacccggctactccggccaatccgcccccgtaattgatacagttgggataagccgtagtgatcagcatcttcgacaatcatcgtattcacattgggcatatcaaccccggtttcaataatcgtggttgtgaccaacacatcatacttaccttgaacaaagtcgtaaatgaccccttctagttgggcctccgtcatttgcccatgcgcatagccgacggttgcctctggcacaagcgcttgaatctcatcgacggtttgttcaatatcactgaccctattgtgcaggtaaaagacttggccattgcgttccaattcccgttcaatcgcttctcgcatcgcaccagcattttgttccatcacataggtttggatggggtaccggttagttggtggggtttcaataacagaaagatcccgcacacccaacatcgacatgtgtaacgtccgtggaattggcgttgccgttaaggttaacacatcgacttgcgcctttaattgtttgagtcgttccttatgtttaacaccaaatcgttgttcttcatcgacaattaataagccaaggtccttgaagacgacatcttttgataatagacgatgcgtcccaatgacgatatccacttgccctttttccaagcctttaagcgtagccgtcacttctttacgcgttttaaatcgtgataacagtccgagttcaactggaaaatccgcaaatcgcgctagcatgttttcataatgttgttgcgccaaaatcgtggtgggcaccaagaaagcgacctgcttcccggctgcgactgctttaaacgcagcgcgcaaggcaacttcggttttcccaaaaccaacatccccgaccaacaaacggtccattgggcgtactttttccatatcgtgcttaatttcggccgtactccgtaattgatcatccgtttctggatacgcaaactgattttcgaagtcggcttgtagttgatcatctttaggaaaggcataacccttttcggcttcccgttgcgcgtacaattcgattaaatcatccgcaatatcttcaatcttagcggaaaccttgctcttagtcttttgccattccgccccacctaatttattaatcttaggtgttttggattcagccgagacgtatttttgaaccatgtccaactgtgtcactggaataaacagtttcccattatcccggtacaagatggtgatgtaatcctgatggacgccgtcgacttccaaggtctccatcccgacgtattcaccaatcccgtgattgacgtgaacgacataatcgcctggttttaattcgctataactctttaagcgttccgcattggctaacgtttgccggcgcaccttcttttttggtgcggtattaaataattctttttcagtcagaacgactaattttaaatctggtagttcaaagccattttgcaatgagccttgaacaatttgaatctgcccagccaccaacttagttttagtcgtgaccgtcgcttcaatctcaaaatcgtggaaggtttggtcaattttcttcactcgtttggcatctgatactaagacgaccactgtttgttgttgcttttgccacctgctcatttccgtttttaacaatggcatttggctaaagaactgttgtacattgcgggttggcatattgccgagcgtatctagttttagcttgcccatccctttttggaataaggataagtataaatgcggatgttggtcttgcttcattaaatgatgaacatcgactaatagcttttgtgccggtagtaagcggcgactgcccaacatatcagtctgccaattagcagcttcttccgctaagacgcgttgtgtttcttgaatgcggggataatcatcaaaaaccactaacccgctgtttttaaagtaatcaattagactcgtatgatcggggtaaaggtaatcgacgaagagtgctaagttttccaagcgctcgcctgccaataatcgactaatcggcgtttcgaagttcacggctaacgccttttgatcatcttttgccgttatcttggctgctgtttgttgataatcggcttgcaatgcttctccggccatttcgagttgtgccgcattggctaatagatcagtcgccggcatgatagcgacactctcgaggttttcaatacttcgttgggtatccgcctcaaacgaacgaatcgcatcgacttcggtatcaaacagttcaatccgaactggattttccgtatcaagggggaaaatatcaatgatatcgccccgcattgcaaactcaccaggtttaccgactaatttatcgcgatgatagcccatttcggctaactgtgcgcctaaaattttcggatcgacttcgccgcccatttcaatctgggtctgactatcacgccattgccgtacagttggcaataaccgtcgcattcctgcaactgacgtcacgacaatcccttttttacccgtcgccaaaaagctcaacgttcgtacacgttcagctcttgattccggtgaactaactgcaatttcggccgccatcacttcttcaacaggaaaggtataaatctggtccccatttaactgattggctaaatcttcagcaacctgattggcttgaaacatattactttcaatgattaataacggctgacgctgttgtttataaatcgttgccaaaaaaagcgtcttggctgagcccgaaaggcccgtaagcagttgtctgacgcctggcttttgattttctaatacggattgcacttgctgggtgttacccaacattgaaattaaatccattcaaaaggtcccttactttcttgaattttgtgactggtagaaatgggcgatacggcctttaaacgtgctattagtgctagtgctcaaaatctaaacaagcactaaaagcactctaatttttaaacgtgccattagtgctagacttctgcgcctagctacgcatcgtaaacaatcggttgcaccgattattcacgatactaggctagtgctcaaaatctaaacaagcactaaaagcactctaattaaatttattcattgtcttcataaagtcgtcattttgacaccagtcgtcgattgcttcgcaggcttgatcaatcgcttgattaatcactggtgcgccatctttatcaaatggtgttagaacccaattgaccaccgtacttttttgaggatgttgaatcccgattttaagccgcttgaaggtttggctcttcgtgtgcgcaataatacttttaatcccgttatggccacctgctgaacccttttggcggaggcgtaatttgcccatcgttaaatccatatcatcttggatgactaataattcatcaatcccaacttggtagtaactcatcaatgggccaactgagcgaccagagtcattcatgaatgtcagtggtttaactaataagactgtttcaccttcgtatttgaagctgccatattctgcttcaaaatcatgtttattgagtgttacgttgtatttttcacataattggtcaattaccataaagccaatattgtgttttgtttttgcatatttactcccaggattccccaaaccaacaatcatcttcatttgtcttacctcttcttcaaaatcgccgttataacgcaaaaatactgagaagttgctctccccagtcgacgtttgttattgctgtttattataccatacccgtttttctttctatattaggaaataaatagttttctgaaaatttaaacaaaattagcgaactttcatgcaaattatgctatactggttttcgaaatgaagaattgttttacagaaaggacgtcattatattggcaaacattgaaaaagatcaccaaaaagttatcctcgtcggcgacggcgctgttggttctagctacgcttatgctttaacattacaaggtattgcacaagaagttggtatcgtagatatctttaaagaaaaaacacaaggtgatgcaatcgatttatctgatgcattagctttcacttctcctaagaaaatctatgctgctgaatactcagatgcaaaagatgctgacgttgttgttattactgctggtgcaccacaaaagccaggtgaaacacgtttagacttagtaagcaaaaaccttaaaatcttgaagacaatcgttgatcctattgttgaatcaggctttaacggtatcttcttagttgctgctaacccagttgatatcttaacttacgctacatggaaattatcaggtttccctaaggaacgcgttatcggttcaggtacatcacttgactcagctcgtttccgtaaagatatcgctgaaatggttaacgttgacgcacgttcggtccatgcttacatcatgggtgaacatggtgatacagaattccctgtatggtcacatgctaacatcggtggcatcaagatttctgaatgggttaaagctcatccagaagttaaagaagaagaactcgttaagatcttcgaaagtgttcgcgacgctgcttacacaatcattaacttaaaaggtgctacattctacggtatcggtactgcattagctcgtattactaaggctatcttagatgacgaaaatgctgtcttaccattatcagtattcatggatggccaatacggcttgaacgatatctttatcggttcacctgctgttatcaaccgttcaggtattactaacatccttgaaattccattgacagaccacgaaatggaaagcatgcacaaatctgcaaaacaattaaaagatatcgttacaaaagcttttgaagaattagatatcgaaactcgccaataatctcgattattgctgatcaaaaagggatcaggacaaattaatttttgccctgaccccttttttaatgtctctttttaattagcgtgttccaacgtatgattgaccatcgccatcaaattaatatcatgatccttaagctgtgcgtcccaagtgagtaattccgccttaattgattcataggtttcaatgccctcgggagtcgcattaacgcgcattaatcgttggtcatcttgttcgccacgaatcttataaaccaatcgcttagactgcaagagatttaattttctagaaactgctggtaaggatgttttaaagaaaacagcgagttcacttggtgattttctttcttcttcaataatttgttcaatcaccaaaaattgttcaaaactaacatcgtatttgcgactaattgcatttaactttgttgcgatttgttgtagctttgagtaccattctcctaataattgcattcttgtatctgctttaccgaccactatcttacctcctacgtaaaatagctgttttaatatgtttgatatacgtatacggcgtataccattataattttaattatttggtcaaccccggtaattagttaccgaaatacctatgtataaaatataaattatgattaaaacacttgaaatttatttctatatttcattcacagctacttccattcaaaaatccttaaatattaaacctatcaaaatcatcaaaccacttatctagagcccttctaatattgttaacatcacttatcatatcgcaatcccatatcgttgacaatagttaattgttaaaatattaacacaagatattaatactattaatatctttatttagtttttatcttaccattcgaaatttcttcacaaactttgttggcgcttatcaagtcattagtttcatctgaaataacgaccaagaccattttttcttgtaacaaccattcatttgattttaataagtgcgcctgccaacattagattgttaagccctttattcgttgttccttaaagttatctaataatcaagctttcgcatttctttttagctcactttctagtatgcttactattagttaacgtcctttgtaattaaaaactatttagggtatgattaatctatcagaaagattggagttgatgttgtgaaggtttcaaagaaagcttataccgctttgggcgtcgcagccgttattttaatcggcggttattctgccatgagtctccactacaacaaagtatttttacccaatacagttgttgccggcactaacattagtggtaaatcgcctgccgaagctaatgaagcattactcaagcaagttaaccaccagaaattcacgttaaaagaagatcaaacgacccgcttatcgtttacagcaaaggatgctggttttagccataatttccaaccgcttttgaagaagattcagtcttctcaaaacggctggtcttggcttggtcatcaattaagtaatcctaaaaaattgcagtctgaaaattcccttattttaaaccaacaaacttttaaacaattcgcaaatcagacagttgctaaattaaatactggtcgaacagcttctaagaatgcaacgattaagttagttaatggaaactttgagatcgttaaagaagtcaatggtaatcaaatcgaccaagcacaatttggaaaaacaattaacaaagcaatcaatcaaggtaaaacctccattgatttaaaacaagactataccgttccaactattaaatcgaccgattcagcgcttcaaaaaacggctaagaaaatgacgaccatcagtgatgaaaaaattcattattccgttaatggtaatgaattcacagtccctaaggccaccattcaaggttggttagttaataacaacggtgcggtgtcacttgataaaactgccgtttctaattacgtttatcaactcaagacaaaatacgatacttatgataaaccattaacctttaaatcaacgaaacaaggaacagttactgtgcctgccggtatttacggttggagcatctcacctgcagatgaaattagcgccctcatgaaagaagtccctgaaggtaaagacttctctagaactgctgttattcgtggttctgggatgacgcaaaaagatcgcagcgttggttcaacttatatcgagatcgataaaaaggcccaacatatgtggctctaccaaaatggcaaggtaacaatccaaacagacgtcgtcacagcacgaccacctcaaacaaccccaagtggtgtttggagtatttggaagaaagaacgaaacgccacgctcaaaggcactaactttgacggtgtcagtgagtatgcaagtcctgttaattattggatgccaattgatgaaacaggtgtcggtatccatgattcaccatggcaacctaaatatggtggcacttggtataaagaacatggctcacatggctgtatcaataccccaccaacaattatggcccaactttacaataccgttagtgaagggattccagtggtcgtcatctaaaacaacttaaaaaaggtcctaaaaagcaattcatgcggttgtctttttagggcctttttaaatctcattaatatttaattgttttttcgccaagtcgaaaaactagttattttaattacgtcaatggtatgctatgattacatcagtatatgagagaattttaatctaaggagaaatgcttatgttaatcaaatccctagtgttacccaaagaacgtctgaccacgattgaagaatccgtgacacttgaagaagccctaacgattttggaagattccggttaccgttgtgtgcctgttttagatgccagcggtaaaattttccgtggtaatatttataaaatgcacatctaccgacataaatctcaagggggcgacatgcaattgcccgtcacaagcctcttgaagaatatgacgaaatacattccagttgatgcgccatttttcaaggtcttcttcaatatcaaagatttaccttacatcgccgtattagatgaagacagtaacttctttggtattttaacgcatagcactctacttaatatgctttcagaagcttggaacttagaacttagtagttatgtgctcacggtcctttctgccggtgaacaaggggatttagttgccatgtcgaagattatcgccaaatacacgtcgattgccagctgcatgaccttagatgccaaacaagacgaattcgttcgacgcacactcttcacacttcctagtgacttagacatcgaaattctcaagaagatcactaacaaacttgagaaaaaaggctttaaagtgcccgaaattgatgacttacaatctggtaaagttctccgtaatgattctgacgaaattgaaaatgttatttaaactaaaaaaagtgcgtttgaaacgctttgactttgagcattagcacagctcggtgaataactgctgcaagcagttgtttgacgagtgacgctaagcgcagaagtcagtttcaaaaagcacgtttaagaaaaaaagtgcgtttgaaacgctttgactttgagcattagcacagctcggtgaataactgctgcaagcagttgtttgacgagtgacgctaagcgcagaagtcagtttcaaaaagcacgtttacaccatcaatgttcggatagtaaaaacggcgctaaagacaaaattacttttgtcctagcgccgttttttttgctattaaatttgtcgttcaaaatgcaagacttgatcgaccgcgtacataattggtgcggtaatcgtcatgataacagcttcagaaatcgccaatgtggcatacgttggccagaatgggatttgcgttttagccgttgagccagttaaaacaatcatccaagcaatcatgaacatcgataccgtgaataaaacgatattaactaacattttttgccacgtttttttcaaatgaggcatcacaagcgttaaaacaagtaatgctaacagagtttggccaccgccaaataacgtatccaaaatcttattttcagagctaaagaagaaattgaagacaagcacgcccccaaaaacgccccataaatattttttattgaagacaaccagatggtttaacccttctgatactcggaactgaatgggactagaagcaaggcccagtacacctggaaatagtgataacaccacgtatagcgcagcaactaagccatttaagatcacactacgcaagcgattttgattagtcatttaataatcctcctagtttttttagcgtgggatggttacgaaccacgttttttcaatgcgattactatcatagcacatctgaacactcgatatcaaaaagaaaaagtctcagacaccttgtctgagactctcgcactaacttatgtattaaggattcaaaacaggttggagcccaacgctaattgttaacgcgcgatcaacttgacgcatcttctcagcaactaaatgcgtgaccttgtctttgaggcgttgtttatcaatcgtccggacttgttccaacaagataacagaatcacgctcaacaccattggccttagctgtgataccaacatgtgttggcaacttaggcttttgaatcttcgccgtaatagccgccacgattaccgttggactatgatgattgcccacgtcattttgaataattaacacgggacgcatgccaccctgttctgatcctactactggtgataagtctgcataataaatatcaccgcgttgtatcaattctcccacttctatccctccaattaggataaatcaactgtgcgaatgcgggcgtaagcctcactttcacaagcgttgaattcagcggcgatttgactattaagattggccatttcgacatagccgttaatgacgttatcaaccttcgcttgccgggttgccataaattcatggatggcatcttgaatcaaatcattctcatcaaggccgtaaacctcgcaataggttttaatctcttgtactaatttaacgtctaagttaacggataattgttcgtggttagcttccatcttcatcagcctccgaaatcaacactttttaacctgtatttatcctaacacagaaatgaagataagcaaaattgttaatcgttagtgttcatttaatccggtatacacacggggaattcgatctgataaatcacagataatttcatagtgaattgtatcagcataatcagccacttcttgtagtgtgatttcatcgtcgccactcttaccaacaaagaccactttcgtccctactggataacgtttgggcaagcgaatcatcatttgatccatacaaatgcggcctacaatttcacaacgttgcccatctaccaagactgttgaaccttgcattcttctcaaccagccatcagcatagcccattggaatcgtaccaatccattcacctttggatgcttcataagtcgcaccatagccaattttggtgccagctgcaacttgtttgacaaagaccaattctgattcaatcccaagtgctggtttaagcggataaggtaaatcaggaatcgcattaccagaaggattaagaccatataaactaatgcccattcgaataatattaccattacatgccgcatgccataaactcgttgctgagttagaaacatgaacaaatctaggccgttccggtaaagccgtcattagctgattaaaccgtgcgctttgttccttaaaataagtatcatcaggatcatcggctgttgcaaaatgcgtgaataccccttcgaaatcgaaataatcagaatatgctttgataaaggtataggctgctaagagctcagcttcatcgcgcatgccaattcgacccataccactgtctatactcaaatggatgggtactggatggagataaggtacctgttgggcaattgcagctgcttcttgtaaccattcgagcgaaccgaccgtcaatgaaatttgattggcagcagctaattcaatttcactaggttgtgtaatcccaaggaccaagattggttccgtgaaattagcccgacgtaacgctaaagcctcgtctaatagcgccacacaaaaaccagcggcaccagcggcttgagcggcctccgcgactggtatgaggccatgaccgtaagcattggctttcaataccggaaagatcacggtatctgtcccttcaagatgttttaattcgttttgaatattttcataaattgcattttgatcaactaaaatgcgcgttggtcgtaagtagccgactgtcatgtcttaacctctttccaaaataacttctgcgatcacaagtgttgctgtatgtgaaagcgagacgtgaaccacaccatcaaataaatcttggttgatgtacggtttgccctggggatcattcagcgtttccactgcttgcagtttcacctggccaatccctgtcccataagctttactaaaggcttccttgactgcaaaacggccggccaaaaattctagtgcccgacgaccagtataatgactaaaaagttcaaattcagttgccgttaatactttttcagcaaaacgactatttttctcttgtgctttttcaaatcggtcgatttcagccaaatcaattcctaatccaactatcacagtattcgcccctagtagcctattttctattaagtttaccacaaagccgatgcggaaaaaacttacagctctgtcacatcatgatatgaaaatagcgccccaccaaaattggtaggacgctattaaacgttaattatttatcatttgtccgaattgtgaagttccgttttgaacggccatcagtcttcttacggctgtcgccgcgattgtcgttactacgacgtttgctgctatcaccgttactgctgctacgacggccatctttgctgctgtcgttgccacgacgtttgccatcgccactactacgacggttaccaccacgataaccaccgccgttaccgccacgacgattgccgctattaccaccacgactgccgccgcggttgccaccctttttacgtgaaggcaatggacgttctggtgtgatcttaactggaacggcttctttactgattgtcttcaaaagaactgaagctaattcaacatctgagaattgttttaataattcttcagcttcttcgttgtatttagctaattggcctttttcaatcattgagttgatatcagcaacagctgctgctaattgacccttgaaggcttctttttctgaaggtggttgtaaaggtaacatccgtttcttcgttaattcttcgataatccgtaagtattccatttcgtttggtgtcacgaaagtaactgaaacacctgatttaccggcacggccagtacggccaatacgatgaacataactgtctggatcttgaggaatatcgtagttataaacatgcgttacaccagagatatcaagtccacgagcagcaacatctgttgcaactaagacatccaaacggccagccttaaatgatttcaagacgctcatccgtttttgttgtgataaatcaccatgaataccttcagcattgtagccacgagccttcaaaccacgtgttaattcatcaacacgacgttttgtacggccgaaaatcaatgttaattctggtgattgaacatcgaacaaacgggtcataatgtcgaatttttcaaagtctttagcacgaacataatattgatcgattaagtcagcagttaattcttttgacttcactttgatcatttctggatttgtcatgaagctcttaccgatcttcatgattggtgcaggtaatgttgctgagaataataatgtttgacgtttttcaggtacttgtttgatgatactttcgatatcatccacaaaacccatgtctaacatttcatcagcttcatctaaaactaatgttttaacgtgatctaatttaacagtccgacgattgatatgatccaatagacgacctggtgtcccaacaagaatttgtgggtgatcttttaatgaacgaatttgacggcgaatatcagcaccaccataaacaacttgaaccttagctttacggtcgcgacctaaacggtaaagttcttcttgtgtttggatggccaattcacgtgttggtgaaatgattaatgcttggatatccgggttatctaaatctaagttttgtaagattggtaaaccgaaagcagctgttttaccagtccctgtttgagcttggccgataacgtccttgccagctaatgccaaaggaattgtttccccttggattggtgttgcttcttcaaagcctgcgcggctaattgctttcatgattggttctgatagacctaattctgagaatttcaaatagtgttcctccttgttttgtaaaaaacatgccattacaaaacaggtccacttcatcagttacaccattttcaaaaatctgtcttgtaatataattgttttcaagagcctttttcattaaaaaagctccttaatagcttatcacgctcaccattaattagcaaacggaattaacccgattatgggtgatattcattgttttatgacattaattagtcgtgcgaacccgactctaccgctgtaaatgaatcagctaaaattctttttgccttgttaatcgttctcagtcgtcaaagcagccactactttttctaaatgcaagccatgactagcctttaagacgactaaatcggatggttggatggtttctgctaaagcggtaattaattcaggttgctgtgttttttcaaagtagtgtagttgttctgctggataaattgttgcgagcttatcgaatagtggtttaatttccgtcccaaatagataaacttcttggatttgagcaggatctaagaccgttgccaaactctcatgaagtttcttgctagctgttccgagttccaacatgtcccctaagacggcgattcggcgcccatcagtttcaaaatggctaaaattgcgtaacacttcgatagccgctgttggatttgagttatatacatcacttaacattctttgccctgcggtcccgaccaaccattctgttcggttacgcgttacttcaaaattagctaacgccttgctcatcacttctggtttaatgtgataatgttggccaattaaaatagcggctaaggcgttattgacgttgtacgcacccatcattggaatttcaaaagcgacgtctggccaagcattcaacttaaattgcgtcttcgtttcaccagcacggacttgaattggataaagtgtgttggttgtcgcactcccaaaagtttcacgttccaaatcgccaacgcgttcatttaagagtggttcgtcgccatcataaaccaataagccgtcttcttttaaaaagtcggtgatttccatcttggcatcggcaattttatcccgtgttttgaaaaattcaatgtgtgcttcaccaatcatggtaatggcggccacatctggcattgcgatttcgcttaaagcgtgcaattgtccagggcggtccattcccatttcaatgacgagaatttcagtattggcttccattgacaaaatcgtctgaggaacaccaatttcattattaaagtttgcttgtgttttatgaatattatattgactgcccaatacagcggctgtcatatccttagtggttgttttaccgttactcccagtaatcgccacaactttaggattaatctttagtaagtaccgtttagccaattgttgatacgctgctagcggatctttcacaagtaatactggaaaatcagttggttgatcatcacgtgcactggcccataatgtcgctaccgcaccgttttctcgtgcttgattgataaaattatgaccatcccgattaccggctagtgggacaaataacgcccctggccgtaattcacgcgcatcaaaagcaacacttgtcacttctactgtcgcccattgttcagtctcatttttcgcaccagtcatccgtgcaatttcgctcaattgcattttcatatcttaaatagctcctattggttagtgatcaaaagcccacgctttcaatcttatttttatgattcttataaaaagcccacccgactatttcgcgtggttaactacgcaacattgtaccataaattttcaaaagaccaacagcagattctagccgaccaatccgttaataaggtcgtgaataggcatcacttttttctgctgattgccgatattgttgtttattaggactctgccagccggcaaaggcccggtcgcgtaattgatgatccaattggcgtggcggtcgactatccagttgggcatgttgtaaattattgcggttagcatagttgaaagattcgccatttaataacgcatttttttcggcgatattcaatacatactgtgccggatcactttcaatttgatgaggtgtccgataccgtaacacatcccactgcgtcacaaactgcccagttcgatcaatgataaattcgctatgaaaatcaggcgtcaaccgtttacgattcaagttagcatccgcattaaaagtgacaccgcgcatatatttattatgcaagcgggccggttcccttttcaaccaatacgcccgctgcttcttttgccgttgcgcgacgaatttttggagtgccatttcatcagaatcaccggcagtcttaaaatgggttcgaatatactgaatattttgccgatccagatacattctaaattgatgcagccgctgatccgtcaaatcctggtctttaaaagcaagttgaacactctgcgcaaacgtctttaaaaatggcgcgtccggtggcatttctgaatagatttcaaaatcttctgcccctaattgtaaaaaatggtgcgcatctagctgtgcacccaactgcatcaaaactaaattagctcgttgccaattaaccaaccgattcgttgtccgaccaccataggcttgatataactgctgataaagtggtgagcccacgcgatgtagcgcacgattggcagccgttagattaaacaacggttcttgctgcctgataatggccgcataagcccgcaagctgttatcatcccagttttccaactctaactgggcaaaatgagcgaccagtccgtttttggtgggaagatggtaccgtaattgggttttctctagccaaagcgcacttaaggccgcaccattactaggctcaatcaaattctgaattaacaactgttccagctttgtttgggttgcagttggcaattgaaatagccgcttgtcctgtaacgccaacagcaattgaccacgtacttgtggcaataattgttgttgtatcatttgccgcatgactgccgttgtttggcgatcttgcaattgcgtgatcagtaccgtctgtaaattcattaatcgtcgtaatttttgattaaccatcatccccaccaccttacattcattatacccgttaatcagtcagacgccgaaagtttcacacaaaaaagactggtcagcaaacaattgcgatcagtctcttttaagctaattaataactactacatattacgtaaacgttcgacccgttgttcaattggtgggtgactatcaaataaatgcgcatcaaagctaccgcgacccttaaacggatctgagatatacaacgccgcgctagacggatccgcagcttgcatcggttcactattagaaatcttcaataaggcattgattaacccttctggattccgagtcaactcaacgccggaagcatccgctaagtattcacgatttcgcgacaaggccatctgtgcaatgctagccgctaatggtcccagaatcattaaaagaattgaaaagactaaggcaatcacattgcctgcgccaccttcgcggtcatcatcgcgatcacgaccgccgccccaccacatcatattactcccgatattaacaagtaacgagatgaccgcagctaacgccaaagcaatcgtcgataagcgaatatcgtagttcttgatgtgtgaaacctcgtgggcaatcacaccttctaattcttcacgatttaaccgggccataataccggacgttacagcaaccgcggcatttttaggatcattacctgtcgcaaaagcattgggactatcatcgtcgacgataaaaacccgtggcattggaatctgaccgaccattgccatgtcttcaacaatatgccataaatctggatactgactggcatctttaatttcgtgcgcgtgattcatctgcatgaccacattagtggaattactaatcatcattaccatataaacggccgctaagaccgccgcaatgatcacacccgtcaaggtgttttgcatgaagagatagcctaatgccgcaccaattgcgagtacaagcatcaagaatccaatcatcacatagacggtccgtcgtttattctgtgcaatttgttcatataacatttcagatcacactctaatcgaaagaaacttttggcacttctttttcaacttctggcgttgctaagtaagccgtcttttggaagttatgtgccccagcgatgatgttgcctgggaaagtttcaattttattgttaaaacgagttgcacttgaattgaacaattgacgtgcgtaagcaatcttgttttcagtattcgttaattcttccatcaacttcatgtattccgcatttgctttcaaatctggataactttctgttaatgacaagatgctcttcaatgattctgataattgattagaaacagccatcgttgcttgacgatcatcacttggcatttctaataattgattacgcatttctacaactttggtaaatgtttcttgttcgtatttagcgtaacctttcaccgttgataataagttgggaattaaatcattccggcgcttgagttgcacatcgatttggctccatgattcatccgcccagttgcggcttttgaccatgccattatacgtgctgatgtaaaacgcaacggtcccaacgattaatactaatataataatcacaactaaccatagcataaactaatcctcttttcttttgatattgtcttcatagtagcagactcttattcacaaataaagcagaattattattcttaacaaaattcaaaactatcgccgattagtggtaaactagagagatatccctattagcaaaggaaggtctcacatgttttctgcacacccaacaattgcggatagcgggctgattgatccgcgatttatcaaacctaacgcagctttaccagcggattatttagcactatgccaagagactaacggtgggtttttaagccgctttagccttcccactagcgaaccgactagtgatggtttagaccacgttgagtgtcattatctcgctggtattgcaacgggttcacaagcagtcatagaagtggcgcaatggcctgattatttgataccatttagtcaacacggtacgcaatattttgcgttcgattatcaacaatcacctgataatcccagcattcgctacattgataccgaagttgaccagtggttgactgttgcgtcctctttttcccagtttctcgcacaattaggtaccaaaccgattgttgttcctgaaaccgatgacttgacgctgacgccgttgcaacgtaatcactacctattaattgcacctgctgaacaattaatggcgctactagcgctttatgaggctgatagccctaaagactggtatttagactggctactctttttcgcgcaatctggtaccttagaacagcaaaaatgcgcattagatgcctaccatacacaacgtttatattttaaacgccaattgcctcaagctaagagtcaacagttggcacaaatttttgcacaacaacctgcactactagcgacttaccaagcttatcaaaagcaatggtcgccgctttaactcattagaatcgagatgattgtttcatgttgactcatatccgtcaacgtttattcagacccagagaacaatgggagcaaaaccttgttgttttatggtttgggaattttatggccggggttgcctttagcctcattatgccctttatgtcactttatatagatacgttaggtgatttttccgccgcacaactgagtatgtggagtgggttaacctactcgatcaccttcttagtaacggctattatctcgccttggtggggcaaaattgccgatcgtcgcggtcgtaaattaatgttactccgtgcttcgcttgggatggctattgtcctaggggcaatgggcttagtccaaaacgtctacgagctgattgcactgcgattactccaaggggtattttctggctatatcagtaactcaaacgccctcatcgcaacttccgctcctcaagaaaagagtggtcaagccttaggaaccctgacaactgggaccgtttctgggactttgttaggcccactacttggtggcgttgttgctgaaatgactggttaccgaacgaccttcttcattaccggaaccattttattcgtcgtcttcttactctgtttagctttcgttcatgaaaacctcacaccaatcgaaaaaggcgaccaagttcctgctaaacaactgcttcaaaaccttaaatatccccatttaattatcgggatgttcgtcacaacgatgattattcaagcttccaacaactcgattagtccattgttaagtttgtacgttcgccaattaatggaccatggtaaaaatgtcgcgttagtcagcgggattgtcgccgcgattccggggattgcgaccctgattgccgcaccgcgctttggcgccctcggtgatcgaatcgggtccgataaaatcctgattggtggtttgattttcgcggtcttcgtctacatcccccaagcgttcgttcaaaacgtttggcaattaggcgccttgcgtctgcttgtcgggattgccgatgcagctttattaccacaagttcaaaccattctagccaaatactcgccgcataattccgccggccgtattttcagttataaccaatccttccaagcaatgggcaacgttgccggaccactaattggttcaagcgtttctggctttttcggttatggtggagtcttcatttccaccaccgtcttagtcgtgattaacctcttttgggtcaatcaaaatacccgtgttcttcgtaaaaatcgagcggacgcggctaaaaaaacatcttaataaaaagagtgtgccatcagtcgaagatattctgaggattaacagagagtggcgaatgattgctgacagcaatcgtttgacattcggcgttaaccgcaagaatatgactgatagaacacgtttagccgataaaaatttgactaataaaaagggcgctaagacaaaatcacttttgtcttagcgcccttttacttttagaaacgcgtttactcaacctgactcctgtgccttgctacgtcgcacaaacaatcgactgacgtcgcttatttgcacaactaggcaactgctcggagtcaaaacggttgattaatcgctctattttttggtaaacgttaatttatttagccattcccggttatgtttaatacagaaataaccgatgattgcgattaaaattgagccgaccacatctgctaacaaatcgcccatcgtatcaactaaggccgcttgtccacgtagtaagtggccatttgccataaaacgttgcatgtttagacctaataagcgatcacctgtgaactcgtagaattcccagaaaacaccaattgtactgccgaatgttgcagcaaagatactcatcaataatggtgaaatagtttggcgtaaatgactcgaaatcaaggctgaaaaaatcgtataacctaagcctgccaacaaaccagcacttaaaatatgcaggaatttatcccaataatagatttgactgtaaaaatgtaacccggtccctaataaaatcgaacaatagataaaaactaaataaacggcatataatatttctgggaatcgataacgcataaaccgttccaagataattggtaaggtcgcaatgactagccccccaacaacttgaaccatcgtaaaggctaaacccgcattttgatcgggatgatttaacatttcttctaaagcaattccgatatatagcaaatgactcgcaatcgtgaagacgtagacccaatcgacccagcgccaattttgtgttcgttttgccacttttatcactccttattcaattaaatgatgtttttcaatattccgactcaaacgcaaatacgcgataaagtggaagatgttccccaggaggattaataatgccccgacaacgacattaaactgaatccccaccaatgcaattacgtaaatcagcacactccgtagtggatcattgcgaatggctcggtagaattgttcgtgttgttcttggtggatcatcaaatcttgatgcaccgccatgaaacgatacaatacccaaaatagacccgagatcaccaacgccactagtgcataacttgtgaatgcaaagcgaatatccgctaaatttcgttgcgcaactgcttcggataacagactcgtcgggtaattaatcagcgtgatggcaaacaatagaatcaaatttaagatattgagttgccaattcgtccgtttaattttagcaaaatagtcatgatgaaataaccataacgttcctacataaaaaaatgataacatatacgctgctaaaatgggccattgcgcgattacagcttgccccaaatgcccaatcttgtagttgggcaacttaaaatctaacactagcagtgtcagcaaaatcgcaaaaaccccgtcactaaatgcttgtagccgatcaattttcattattattctcctccatgattaatcacaattccactatggtcaaatacacgtggttagtgcataatagtgcataaataatcccatttttaggagggcctatgccatcatcgaccactaaaaccacgcaatttaaacttatctttgtactatacagcttactgttaggcttattaattggtggcttagccgccgccttcttagcgcttatcaacctcagcacacaccttatttggcaagttggttattcacatttcaaccatcctgcctatcccttagtcatcggattattcggtggcatcctcgttggtttaatgcagcgttcttgggggccttatccgaaaacaatgcacgaaacacttagcgaattcaaacaaaccggcgccgttgcctatcagcatcaagttggtaaaaatatcattgcggccttagtcgtccgccagtttagggcccgaagcagcattatcagctatcgtcggcggcttgatcacatggttgggtgatcgtcttaaattaacagcccaccaacaaacactatttttaaatatgggaattggcgcaatgctggctactattttccacgccccattcgctggtgtgggtgaggctattgaaaaaacgccgcttcgcgaacactttaaatcccatttcaaccaaatgctattatatattctaacgacggccacggggttacttggttttactttagtcaatcaattattccccaaagaaagcccgtttgccttacacacgccaaccattcattggacattggcagtctggccattacttattttagcattaattgtcggattcgtttttggcaatctatttttaaaaatcgaacaatggtgtcagtggcttgccgacaccattcaccgaccagttttactcgccgttatcgctggtatttgcctaggcgcttgcggtctattgtccccctatttactgttttccggagaacactatttactaacctttaccaaatccggcttggatcaatcgtttggctacttactcttaatcggacttggcaaaacagttttaaccaacctcatctttgctttcgggtggcgcggtggtaaaatttttccagccatcttcgccagtgcagcaattggcttaagtttggcggtcctcttcccctacacccccggattgcttgttgcaaccgtagtagccgtcagttgtacaatcatcgtagcgcaaccgtacgtcacggcgacattattactcttcttattaccgcttcaatttttcccaatcattctaatagcttgtatcggtacgcataaaattcagcaattacacattaaataaccgcaaaaggcccgattgaacgtccaatcgggcctttttttgtgcaaaaaaaaaccagggaaaaattccccggttccaaaataattatttggcagcgttcttgtctgcaaaaccatattttttgttgaaacgatcgacacgaccatctgcttgagtaaatttttgtttaccagtgtagaatggatgtgaatctgatgaaatttcaacacgaattaatggatatgtgttaccgtcttcccattcaacagtttcagctgagttagcagttgaacctgagatgaacttgaagccagttgatgaatccataaatacaaccttgtgataatctggatgaataccttgtttcatgtcttttccgctcctttttactaaagttagtgtgccaccgaaatggcactcaacttaagtttcgccctgagatatttactatgtcagagatatttgtttacataaccattaaatattagcacgaatgccaacaaaaaacaatagacgttcgcggttattcttcaaccattttgacgacagccccgaggcccgttagtttatcaataacgcgatcatatcctcttaaaatattacttgcgttcgtaatggttgtcacaccgttggccatcaagcccgcgatcatcagacatgcgccaccacgaatttcatcggctgatacttctgcaccttgcaatttatccgcatggtgcaataagataacatcattttcgattgagatatccgcacccatccgaattaattctgggacatgacgcgtccgtttaggataaagcgtatcaacaactaggccttcaccttgtgctttcaataaaagtggtgttaagggttgttgtaagtcagtcgcaaaaccaggatatggcattgtcttgacttgtaccatcttcaaatcaggtgatggataaacaaaaatactgtcttctttaacatccatcttaacgcccatttcttctaacttagcaagataagcatccatatgttcgctaatgatatttttaacgttcaccccgtcaccgatggcagctgccatactgaggtaagtccctgcttcgattcgatcaggaataatcgtatgtgtgttgtgaccgtataagtgggccaccccttcaatccgaataatatcagtaccggctccacgaacctttgcacccatattatttaagaaagtcgcgatatcgacaatttcaggttcacgcgcagcattttcaatgactgtttgaccttcagcacgaacagcagccaataataggttaatggttgccccaactgatgccatgtctagataaattttagcgccgtgtaacccttctggtgcgttaatttcaatcgccccatgattattggtaaccaccgcaccaagagcttcgaaacccttgatgtgttgatcgattggccgtggtccgatatcatcgccaccaggcaagcccacgattgctttaccaaaacgtcctaacaaagcccccatgaaataatatgaagcccgtaaactttgaattttaccacttggtaaaggtgttgatacaatatttgtcggatcaatttcaaccgtatcgcccgtgaaggttgaagtaaccgacatatcttctaaaattgatagtaagctgttgacgtccttgatgtgcggcacactatccagaacaactttggattctgccaaaatcgctgctgggataattgctaccgtactgtttttagcgccgccaattgtcacttcccctgatagaagattaccgccttgaattaacatttttttcattttttagatttctccgttcgattcataacaaaagagcaaacttccgttgactaattaactaagttattgcaacttaaagtacgcttttggctttccaagtttattatttaattgattatcgatttgttaacatacctaaaaacatgttatatcgtttctaaataagtcatacacgtataataataattaattaattgctaaattacaagccattctcagaatatcattcgttttataacaaattatagtttatagcaataactttttaattaattcagacattgaatcccttgtgaatcagtggacaaaaaaactcggcccacaaatgagccgagtttttattaattacattgttgcgccgatgaatgctttgaataagccttctggtttgtttggacgtgataagaattctgggtgatattgtgcagccacgaagaatttgttttctggaatttcgatgacttcaactaaacggttgtcaggtgaagtaccagcaaatactaagcccttgtctgttaacaagtcacggtattcgttattgaattcataacggtgacggtgacgttgttggataacactttggttatcataagcttcggcagtcttagtacctggttttaacttacatgggtacaaaccaagacgttgtgtcccacccatattttcaagatctttttgatctgacatgatgtcgattaatttgtgttctgcatctgggtgcacttcaccagttgtggcatctgtgataccagcaacgttgcgggcaaattcgatacttgccatttgcatccctaaacagataccaagatatggcacatcattttcacgggcatattggattgaaagaatcatcccttccaaaccacgatcgccgaaaccaccaggcacgatgatgccatcgaaaccagctaatgtttcagcaacattttctttagtgatatcttctgattgaattggtgtcactttaacgtctgtgttataaacataaccagcatgacgtaatgcttcattcactgagatgtaagcatcttgtaattcgatatatttaccaaccaaggcaatcttctttgtaccttcaagattcttgattgtgtgtaacatgtcgatccattctgtcatgtcagcttctggggctgtcatcttgaagtggttcaagacaaaatcatctaaaccttggttcttcaataacaatggaatatcgtagattgattctgcatcgcgtgattcaacaactgcttcgggttcaacatcacagaattgcgcaatcttgttacgcatgtcatctggaattgctttttcagtccgacaaaccaagacatttggttggataccaataccacgtaattctttaacactgtgttgtgttggtttagtcttcatttcaccagcagcctttaagtaaggcactaatgttgtgtgaatgtagatacagttttcagcaccgacatccgccttcatttgacgaagtgcttctaagaatggtagtgattcaatatcaccaacagtcccaccgatttcagtaatgacgatatctgaatcagtagttgtcgcagcacgcatgattttttctttaatcatgtttgtgatatgtggaatgacttgaacagttgcgccaaggtattcacctttacgttctttacgtaaaacttctgaataaattttacctgtcgtcacgttagaatatttatttaaattgttgtcgatgaaacgttcgtaatggccaagatctaaatcagtttcagtaccatcatctgttacgaaaacttcaccatgttggtaagggctcattgtaccgggatccacgttgatgtatggatcaaatttttgaatcgttacttttaagccacgattctttaataaacgaccgagtgaagccgcaacgattcctttacctaatgaggaaacaacgccacctgttacaaaaacatatttggtcatataaatattctccttttcttcttagccaatgctaatccttcagttctctgggaaacaacaaaaaacaaaaacaagctccctattcaaaatgaacagggagcttggtaaccgattctggcttcacaaataattgtaaagcgcccatagaatataatacaagaaatctattttagcgtcaagcaaaaatcacctaacttattaactgcttttagacgcttttttgtagtactatagggtggttgttaaaatcaaggaggtttgcgactatggttcaatccacagaaacaatcttagtattagatatcggtggttcggccgttaaatacggcttttggacggcccaaaaactcgaagatcaaggccagtttccaacacccctcacccggaacaagttctatcaaacagtagctgacatttgtgccgcacacgaaccaattgctgggattgcggtgagctgtcctggtgaacctgacgaagatacagggattgttcacggcatgagctatgtgccctttcttcatctcggtgagttccaacacgattttgcagcccaattaaaccgccccgtctccttacaaaacgatgccgaaagtgccgctttggcggaaatgaccctcggtgtgggccaaaatcatcaaaacgcgttattcacaattatcggttccggtatcggtttggccatcgttcaagacggtctcatcttaaaaaatcttgccgagaagttcgataatcctgaaaagcggttcgctgatacactcaaaacactcaacaattccaaagtctcacccgttcaaattggtaagactgtctcactaaagaatttcaaactgcctaacacgatcgatggcaaaactgtttttgaattggccaaacaaggcgatcccattgctagtcaagaagttgatcagatgtatgcgtcactcgctgaaattctcctctttttaaatgccgcttatcaaccagaaattatcggaattggtggcggaatcagtaataaccctgacttattgccagaactcaaagcccatattgctacgttacttgcttctcctgatagtaaaattagtttttataaacgcttctatcccaatcctgaccaagccttcactaaacccaatttacgaacctgctattttaaaaatgatgccaatctaattggcgctgctttacattacgaacaccgctttaagcgcccttactaatctaaaaaaagaggtactaagacaagtcgttttgtcttagtacctcttttttacgttgactattaagtaaatgactaaagttcatcatcctcatcgtcgtcttcgtcttcatcatcttcgctaaattctgataattgaccttcgataccatcttccagtgcatcgtcgtcttcatcatcgtcatcgtcgccgatgctttgtaagtctgctttatattcagttagatcatcactagaatcatcatctgttacgacaagttctgcctcatcttcaacgtctaaatcttcgtcttcaggatcatcatcactgtaatcaataacatcgtcgtcatcagccacatcggctaagaaagcattaaccttcttacgacgcttcttcttagttggttggtcttcttcatcttctggatggttaacttcttcatcgacagattcatatgggtaccaagaacgcaagccccaaacgttttcgcctaaagaaataaagctaccatcttcgtttaaatctgtataaaattgtgataagcgtgcacgcacttcttcatcacttttgcctaaataattttggacttcattcgttaagtcagcaaatgcaattgtgtcgcccttgccttctaaaattgcgtgagcgacttctatcattgatagttcttctttattttggcctttaaaaacgtctaatttcaaccagtacacgtcctttcaacagtctatccttaatcatactagtttaagcattaaaaatcaatcgtaatttgtaatcaccaacaacctgttggctgatttctaattgataatgaacaacaacttcaccgctaagtggttcgtctgataatgtcatcaataaatgattagtcgtcgtcaaaactggtaagttgccgtattgtgtttggtaaagtgagccctgtgcatcgtgcattttaaaatagaggcgtaattgtgtcgcatctttttcggtgccacgcgttaattggacttgcccatcttctgctaacttaaagcgcacggccgtttcttggccttgtgcgtgttctaagtaacgaagataagtcgtcgtgcccatttggatcaattcgccttcttcatcgaaaacgtggctttcggtttgaccatcttgtgtaatttctgtttcaagatgaattttaatcggcgtactctttttgctagccatgataaactccctctaaattctaaattaattacattataagctaaacaaattagccatgccacctttgattaagcaatcccgccttagttaaagacagttatcctaatttaagctataattataggtatattaatgaattgtgaggtgttattttgcaagatttagcgaccctttatccccagaaaacatggtccgttgttaatcaacaattttcggctgaccaaggtcaactcgcttttgcccacgcgaatacactgttggccctcaccaaagaatgccaacaaccaattattcatttttggacactcgaaaaaacagtcatcttaggcatgatggataccaaattgcctgaattgaccgctgctactgatcaattgaccgccgcgggctatcactattttgtccggaacgctggtggtcttggcattgttgccgataccggtattctcaatctgggcttttacctgccagaagtcgctgatcacctctctattaatgcggcttatgaattaatgaagaccctttttagcgagaccttcaacacgagcaatatcaccatcgagcattttgaagtgcagcattcttactgccccggcgaatatgaccttagtatcaacgggcaaaagttcgctggcattgcgcaacgacgctccaaaaacgggattgcgattttactatacgctagcattgaaggcgaccaacaagcacgtggcactttaatgcagcatttctatcaagctggcaaagcccaacaacaaacgcgttggaccttcccagatgtgcgtcccgaaacaatggctaacctcgctgatttactgcaccaaccactcacggtggctagtgtcagccaacaattaagcgctagcttgcaatcaaattccgggttaaccttgcaatcagatttacaaacactgatgcaagaagccgactaccaaacacaactgaccaagaacacacaattattgcgccggtatcaaccaggataccagccttagaaggagatttttttgtgacctatgcccctcaaaaactaacccgcgaaaaagtatttcgcgatcctgttcataactatatccgtgtcgactatcaagtgattctcgatttaatcgataccccagaattccaacgacttcgccgaatcaaacagttgggtacgacttcgtctgtcttccaaggggcagaacattcgcggtttacccattcattaggcgtttatgaaattacgcgtcaaatctgtgatcaattccaaatcaattaccccaccaagcaacctggcgatggcctttggaatgacaatgaacggctcgtcgcactctgcgcggctttgttacacgatatcggtcatggtgcttattcacatacttttgaacacatctttgatacagatcacgaatcaattacccgccaaattattatgacacctgaaaccagagttaatcagattctgagccaagtcgcacctgatttccccgcaaaagtggcgagtgtcattgatcacacttatcctaatccacaggttgtccagatgatttctagtcagatcgatgctgatcgtatggattacctattgcgggatgcttataataccggcaccaaatatggtgaattcgatttaacccgtgttttgcgggtcatgcggccctatgctaatgggattgcctttttagccaacggcatgcacgcggttgaagattatatcgtcagccgttttcaaatgtaccaacaagtttattttcacccagtctcacgtggtatggaagtcgtcttacaaaagttgctacaacgcgctaaatttctctacgaacaacctgatcatcaccaaagcttggcccctcaattattaattcctttcttcgaacaggatttcaccttgcgggactatctcaaactcgatgatggcgtcttaaatacctactttatttactggttggattatcctgataccgttttaaacgatttagcggaccgctttctcagccgccgtcctttaaaatcagtgaaatttaatccatcaacagaagattgcttaccggaaatgcgggccctcacggaacaagccggctataacgcaacctactataccgccgttaacaacagttttgatctcccgtatgacgcttatgatccgtcggcaaaatcgcccaaaacccagattgaaattatccaatctgatggccaattaaacgagctttcttctatcagtaatttggtcgctgccatttcgggtaagttctcgggagacgaacggttctatttccctaaagaaatgcgcaataccgctaatctcgaagttttcgcaccaatttatcaacaatttaacagctacattaataatggtgcgattcaagcgcacccccacaaccaataaggagtgtttctcattatgtcaattaaactcgtcgcagtcgatatggatggtactttgttaaacgaaaataacgtcctcagccccaaaaccattgaagtggtcaaagccgctaaagcccaaggcatcaaagtggtcctttgtaccggtcgcccactcactggtgtcacacctttcttacatgaattagggctcacagatagttctgattatgtaatcacctttaatggtgccttagttcaaaataccgctactggtaaaatcctagttcgccacaccctcacacatgcacaatacttggaactcgaaacactttcacggacgattggcgttcaccttcatgccgaagatgatcaattcatctacacggccaaccgcgatatcagtccttatacaattggcgaaagtgccttggtcaatatgccaattaaattccgccatgttgatgaaattgccccagataaggccttttcaaaagtgatgctgattgatgatcctgaagttttagctgaaggtaaggccaagattccagctgatttcttcgatcgttaccaattcgtccaaagtgaaccttacttcttagaagtcctcaataccaaagcgggtaaaggcaatggcttacgtgacttagcaaatgcgttggccatcgaccaatcagaagtgatggcggtcggtgatcaaggcaatgacctgtcaatgttagcttacgctggtttaccagttgccatggataacgctattcctgaacttaaaaaaattgccaaagtcattacgaagagtaatcacctcggtcaagacggcgttgcttatgccatcgaaaaatatgcactcaataaataaaatcctttaggagtcacttatgaacacctttatcgatcatttttacatcttaccgctgatcttcctagcgctgtttgtcggactgcagctgactgaaaagcgccggtttatcaacgggattgtctttaatggctttcttgccacggcggttggtgaactagccattctcgtttttcaatcggatagtcgcgacgtttattatattgccctcgccgcagcgattgtcgcctttctgattatcttatttttctacttgtttggcttcttactctttttatggaacgcctacatcgtttggaaaaaagaaagccacacactttcgaacatgctgaccctgtttatcgggttagggttaattacccttttcttcgtgcctatgttggccaacttactccatgtgcccgaagatttacggattttcatcggaacaattagcaccgtttttctactttacatcccgttatttttctatctttatctttcttcactgattatctatctattcaaccgaccacggtataatcaagactacatcatcgttttgggtagtggcttaattgacggacagtacgtgccaccactgttagccagtcggattgaacgggcaatgaccttctaccaccgccaagtcaaaaaaggccgtccggcaccgaagctcgtcttctccggcggacaaggtggggatgaaaagttacctgaatcagtcgccatgcaacgctacgcaatcgaccatggcatccctgttgaacagacgttaccggaagaaaaatccgtcaacacacttcaaaacatgcagttttcaaagcaaattatcgaagccgatacggataaagataaaccccgaattatcttctcaacgaacaactaccacactttccgtgctggactattcgctaaacaagcccatctcaaagctgatggtattggcgctaagacgtcgaaatacttcttacccaacgcaaccatccgtgaattcatcgcgattctctcgatgaaacgccatcagttattatttgtaacaatctgcagtttactatttgcgattctagcagtcttattgaaccatcttaattaaaaaaaaggaccgacaattgtcggtcctttttttatgctcgttgtttgcgaatatagtgaattcctaacgtaatcaagattgttccgaagacaatgcccgcgaacacaagattgggaatttcaatatcaatcgctggaattgataagaacaacttcaccgcgatgaagagaatcaagatatacgccatcgggtttaattctggaatcttttccatcaaacgcgcaataatctgggcaatcccccgcatacagataatcccgatcatcccaccaatcaagacaatcacagggttacttgaaatcgctaatgaggctaaaactgaatcaatcgagaagacgatatccattaattcaattgagataaccgtccgccagaaacgatgtgggctactaattttagaacccggttttttaacttgcttaggttgtttttgtttcctgaaataagcatagactaagtaaactaaatagagcgaacctgcaactttgatctcccataagtggatcaagaaagtcccaacaccaataatgataaagcggaatagataagcgccccataaaccataaactagtgatttttcctgttcaatttttgttggtaaactttgggtttgtgcagctaacacaaccgcattatcgactgatagcaagcattccataatcaccaatgttaaaatcaataaccaatcttcagaagaacgaataactgtttgccagttatttaattcaaagaaaggctggtacaattgtacaatccaattcatacgataggcctcaattactttaatttttaactcgttcctatcttaacgatttttcatgaaaataacaaatattatctcactttattgtcagcgacaatccattattatttattctctgggcaaaatacggtataattttccttgaaaacaattaatagtatggagggatcgctttatgattaaagaatttaaagaatttattatgcgcggcaacgtgctagacatggcagtcggggttattttgggggctgcacttaagagtatcgtagattcattaactaaaaacttaatcaatccaattatctcattattcgtcggtcaagtggatctttcagggattgctgtcacaattccgggaactaaggctgttttccaaattgggaacttcctcaacgacgtgattaacttcttgatcatcgctattatcgtcttcctaattgtcaaaggattcaacaaacttcgcgacatgggcaagaagacagaagaagaggttgctgaagaagcagcacctactcaagaagaactatacttgaaggaaatccgcgacttgttagcaaacaaggatcatcaataagctatcattcacaccatgaaataaggagctgggacaaaagtaattttgtcttcagctcctttttcgatatccgaatattgatgatataaacgtgttctataagtcatatcccgacttatggcacacgcccttttttaattactttttaagtttgtggtgcataatcgtatccactgtttgcttcattcgccaattgtattgctcatcttctaaaagtaacatcgccaaaatatcgataacataggtcagcgcaaattgtgagttcacaaaccgcgcactggcaaagccaatgctatcttcaacaaacaacgtcaagtcactcgcagctgccaatggactatcagtcccactggtaattgcagccgttttagcaccattttcccgcgcattttggaccgcttgattgacctcttccgtattaccagaatttgatagaccaatcactaaatccgttttgttaataatccgagaggtcatcaacatcatatgactctccgtgacgacagtcgcttgaatgcccattcgggttaatcgctgcccaaactccgcgcccgtatagcctgaactacccaaaccatagataaaaagctgctggctggttttgatccaactaaccaactgatcaaggtccgcttgtttaatccgtgcctgtgtcttagtgatgacatcttgatagaattgataaatttcaacggacgtttgtgattcatgatcaacctgtccttgaatccccgtcatcgttggttgggggccctcactaaattgtaatttaaaatcaacgaagttttgacagccaatcttacgaacaaaccgcgaaatggttgaattactaacttgcagttcagcggctagttcatcaatcccaatccgctgaatgctcgcccctttttgaatcaccgctagggccaccttttgttcttgtggcgataaaaaagaatattgttgtttgatatgctcgataattgccattgtaactcctttaaaaaccgagatctgtcttctctttattatagaagaccacgcggcttttagaaagaccggcgcttatttaacttgaatcgcgtcgacataatgcttagcaatcaactgcggacgtgtgatacttgaacccacgacaacgctatggcaaccgagtttaagaacggcggccgctttctctggagaatcaattttaccttccgcaatcactggtactttagataacgccaagacctttttcaagtagtcaaaatcattatcagcaatattacagcctaccgttgctggtgtataaccatacatcgttgtcccaacaagatcaaatcctagtcggttagattcctccacatctgccaggctcgctgtatcagccatcaataatgtttcgggatactcagcacgcatcgtggcaacaattgtctctaactgctcaccattggggcgtgggcggcctgtgacatcgcaggccacaaccgctgcaccagtcgctgcgattcctcgcatttctttgagcgttggtgtgatatagattggtgcatccgggtaatcgactttatctaaaccaatcacaggaagtggcacggtatccataatggcctgcacatctacaacagaattcgcccgaatggcactggcacccgcttcatatgccgcctttgccatccgcgccatgataaatgaactatgaagtggttcatccgctaatgcctgacatgagataatgagttgtcctttagtcgtttctaagaaatgatttgccattataattgccctctttttattaagattacgcttacagatagcatacgacgcgcctttattttcagcaatcaccactgttggaaatctttttcaggtggacaaaaaaagaagccaccacataaaatgcggtgacttccgattaatttctgattaacgtttaaatctattttcgaacaatggactaactggtttgttttcatggattcgtttgatcgcatccccgattagtgggccgactgaaacttgaaccatcttatcaattagtttttcttttggaaggtcgattgaatctgtaacaatcatttgcttgataactgaatcttcaatccgttggatagcaggacctgataaaacagggtgtgtacaacaagcaaagacttcagtagcaccggcatcttttaaagcttgtgctgctaatgtaattgtcccagcagtatcaatcatatcatcgataatgattgcgcgtttaccattaacgttaccaataatgttcatgacttctgaaacattaggtcttggacgacgtttgtcgataattgcgattggtgtcttcaagaagtcagccaatttacgagcacgtgtcacaccaccatgatcaggtgaaacaacaacggcgttttctgctaagtcgttgcttaagaagtaatcagctaataatggtgcacccattaagtgatcaactggaatatcgaagaagccttggatctgtacggcatgtaagtctaatgctaaaatacggtcagcgccagccatcgttaacatgtttgctactaatttagcagtaattggttcacgtgagcgggccttgcgatcttgacgtgcgtaaccatagtaaggtaacacaacgttgattgttttagcagatgcacgacgtaatgcatcaatcataatcaagatttccatcaagttatcattaactggtgcagatgttgattggattaagaaaatttcgtcaccacgaatactttcttcaatattgatctgaatttcaccatcactaaaacgtttaacagaagattttcctaaaggaaccccaacttcagctgcgattttctcagctaagggcttattagagttcaaagcaaagattttcaacttagggtcgaaatattgttcagacatgtcagcctccaaaaatttaagtaagtacttatttaaattctaggcattttcgcaatgaaaatcaagattaaaacctaaaaaagattttaatttacgctaagtaagcgctgttcattagaaatgcaagagagaattaaatgttaatagctataaccatcgaacctcccgtttagtataccgttaaattcgaaaaaatgcttggttatttttggttgtgaatccaattgtcatttaatgcgtgacaaggtacactaattgaaaaaggagattactatgacgcgacttaaatatactatttttaataatctctatttcttcattctggtaattatgattactaccgatcgcttattccatctcagcatgccctatttcattttgggtctcattttattcgttgcagtcttgatttatcagtaccgttttttctaccccagccatccaaattataaccctaaaaattatcgcgttacaaaaataggttgcgcaatcaccgctgtgggatgtctaatcatactcctgctaatcttctttttaagtggctcaatttggttatggcccgcttttctaatcacctgcttaatgcgcgattatttctcaattttaaaataacgacaaacataaaaaaatcgtccgtaatctcagaaataagattacgaacgatttttatttcaagacatgctttacaacactaatcgtcacaaacacgctctaatccgaaacgtgcttcttgtcgcagtaatttccgctcaatctaaaaatagtattaatgtttaattactaaccgcgacagccaacactctattgccattcttcgtcttttgcgactggtaatttagcccagtagttttctttatttgtttgacgtgcacgggcgatggccattgctttttctgggacatcgtctgtgattgttgaaccagctgcaatgaatgtgtgatcagcaatttcaactggggccacgatgtttgagttgctgccgatgaagacgtggctaccaacatttgcatgatgtttagccacaccgtcgtagttaacaaaaacaacaccacaaccaacattaatgtcagtgccaagggttgcatcgccaacataacttaagtgaccaatcttcgtgcggtcgccaattttagcgtttttcacttcacagaagttcccaacatgcacatccacaccgatttcagcgttaggacgcaagtggctgttagggccaatgtttgagccggtatgcatgattgctgattcaatggttgaacttgtgatttgaatattatcttcgattgttgaatcaataattgttgaaccagcaccgacgaaacaatctgaaccaatcgttgtgttgccttttaagacaacattgggttcaataattgtatcgttaccaattttaacaccgacttcgatataagtactttctggatcaatcaatgtaacaccatttcgcatatgcgctgtgttaatccgttgacgcatcactttggtagcctgtgataaggcaacgcggtcattaacccccattgattcttcgaagtttggcatcttgtaagctgctacaatttcgcccttcttcttcaagatttcaaccacgtctgtgaggtagtattcaccttgggcattttcatttgtgacttcatgaagtgcttggaaaagtgtcttgttgtcgaaacagtaaacacctgtgttaatttcattaacagcagcttctttatcatttgtatctttttgttcaacgattttttcaacgatgccaatatcgttacgaataatccggccgtagccagttggatctggtgctgtggccgttaaaatagttgctttagcgcccttatcatgatggtaagcaaatagcttttcaaaagtgccagctgttaataatggtgtatcaccactaaccacaattgtaataccatcttggtccttcaataaatcttcagcttgtaaaacagcgtggcctgttcctagttgttctgcttgtagggcatattgtgaacgatcgcctaaataatccttcaccttttctgcgccatgtcccacaattgtgacaactgttgcaggttctgttttttcgacttcggttaacacgtggtccaccattggtcgaccgcaaacttcgtgcaataccttgtataattttgacttcatgcgagtacctttacccgctgctaaaataattgcatttttattgaccatcttaaactcctaatattcgtgattactggtctattttagcttaatcaagcgattaccgcaagctatccctatttgaaattgctctatgattcccgtataatgatgttaattcagaccgattggagcattaaaatgaaaaaaagcccttcacgtctttggttaactctcgatggcctgttaatcttattattagtggtgcttggtattaattggtctacctcacatcaccaaccggctaaaccaactgcgagtgttactcattcacaaacagcacacgtgaaacaaacacctaaaaaacaaacatctaaaaagccactcgattggcacgccccttctgaaaagaaaccctatccagatgttaagaaatacgcacatttttggattgatgtttcaatcaagaagcaccgcgtctacttaatggacgatgaaaagcggctctataccatgcgtgcttcaaccggcacgagcgattctcctacacctaaaggtactttccatattcaagaagaacacggtgaagccttctttaatggcaatcctggtgaaggggctaaatattggcggtcatttttagatcacggtgtctaccttttccacagtgtcccaaccgataaagcagggaattttctccccgatgaagcgcaaaaattgggtgaaacatccaattctcacggctgtatccggctatcggtcgctgatgcaaagtggttttatcaagcaatcccagtcaataccaaagtcgtcattcactaatgggcgactttttttgtagaaagaggcgttttgatgtcagttacgattcaaaaaaagattgccacagtgtttaaggcgctcatggttgataccccgtttaagcaaattagcgtgacgctcattatgaccacggctggcattcgccgccaaaccttttatgattattttcctgataaatatgccttgctgacttggatttacgatcaagaaatcggcgaatacgttgctgatcacctgacttaccctcactggaccattattttagaacaactactgacttattttgaagacaaccgtacgttctatcaaaatgcgattacaattaatggtcagaactcatttgaaacccactttaaccaccacctacgtcaactcgttcaaattattatcaacgatttgacgcagctacaccatttaacgttatccccaacttatcaacaatttctacttgattacctctcaggcgcgattgttgcctataccgccagttggttacgcacagatcaaccacaatcaatccaacaagttagtgccgccttacaaatcacactaaccgataccatcaatggcctcttattacgtactggccacctcgatacaaaaaaagagtatgaagtcggctaatagccgtttcatactctttttagtttaagaaagttgttctgcattcttcgttaaatagttaccagcgctaacactgagcgccttgttttcaatatccactttatcaaccttcaaaattgatgtgtaatcttcaaccatgtgattaccttcaaagacagattcagcaaatacggaaatgccaaccatttcagaatcgaattcttcaattaagctcttcatcccgttaactgtgccgccgcctttcatgaagtcatcgacaattaggacttttgagttctctggtaaactccgttttgaaagttccatcttctcgattcgtgctgaggaaccagaaacatagttcacactgactgttgagccttcagtgatcttagaatcccggcgcacaatgacaaatgggacatttaggaacatcgcaacgctctgcgcaattggaatccctttggtggccactgtcatgaccgctgttacttctttgccaacgtattggttggcaattaatcgaccaacttgacgaagaacttctggacgacctaataaatctgataaatagacatagccccctggcaacagacgatcattttcagaaagacgttcggccatttcagcgataaattcttctgcttcaacttgtttaatcattggcatgtaacgaacaccaccagcagcgccgggaactgtttctaaaatccccgtcccgcgattgaaaaaggtccgtttgacgattgataaatcttcactaatagatgatttagctgattcgtaacgatttgaaaagaacgtcaatggaattaatgtatgtggtctttccaacaagtaccgggtcatatcaattaagcgatcacttcttctaactttcattatacttactccctttaaaataataatttcttccgataaaactatccgctttccaattatatagattttattcgctaaatcctagtctttttttagaaaagttcattattgttcgtttttttatcatttgtctttttaaccgcttaccaccaatagtattaaaaaaatcgcccaccactagctatagggggacgaattgtctttaatgatttttatttttttaatggttgcactagataaacttcacgacaaaatccggacatactgttataaatgcgttgcgcgcgtgagtactggcgacaaatgccaaaaacagttggaccactaccgctcatctgcgctttttccgcgccaaatgcagttaaacgttgcattaaataatcaatttgcggatagcgttgattggtaatcggcgttaacacattagccattgcggctgtcatttgctgtgcatcttgttgctggatccccgctaagagtcgatcggtttggggccgatcagtaatctgatcgcaattcaaggcgtgtaagatgcgcggtgttgagacacttacttcaggtttaacaacgaccatccaaaagttaggtaaatcccccaacggttggatttgatcgcctttacccgttactagtgcggtctcactataaacacaatatggcacgtctgaatcaattgataaaccgatatgcgcgagctccgctttggtgaggcctaagtgccacagttgatttaaaccgcgtaaaactgcagcggcatccgaactgccaccacctaacccggctgccacgggaatatgtttatcgatttcaataatcgcacccgttttaatatcaaaacgatgccgtaataattgcgccgcctgatatgctaagttccgtttgtcctccggtaaatatcccttagaggttctaacctcaatttgaggtgagtcttgcaatgtgatttggacataatccgccagatcgattgacgtcattatcatctgccattcgaattccccatcagtatgctgataaagtgcatctaaacttaaattaatcttcgcaggtgccttttcaatcaattgcatatcgtctcaccatccaccaacattcaattgtttcattatactcatttatgaactaaaaaccaagagtgctgtactaagcggggatacttctgaagcttagtgaaatcagacgaataagcgacaaagtcgattgtttggctgacaatactaactggaagaagttgcttagtacggcacgtttcaattcaagagtgctgtaccacactggagccttcacataaaaaaggtcaagcctctcaacttgacccactcttttaattttcttccgccatgactttttgtctgaactcattcattaaaaataacatctgtttagcattttctttgccaaaggccatcatccacgatgaaaaacgttcctgaaccttcggtaataactcactcactgtttgttgaccacttggcgtcagatttaaaattaagcgtctgcgatcacttgggtcagttaattgcgaaatatagtccaacttcaaaaggacacgaatttgacgtgaaatcgcccctcgtgttacaccacgcttcttagcaatatcaattaaactaaccgagctatcttccgcaatctccttcataatcagaaattgttcgaaagatagcttgtaagccttagttggttgcgacacgaggtcttcaacatacttaatggcagacatataaatctcaacatactcatccaataattgactatcttccacaattattcccacccttgttcactttatttaactgtaacataaatccgcataattgactattgacactattgacaatcgacaagcaacggctgtttataaattagtatatcccatatacaatatcatgatacgcgccaaatgtcaacaacaaaaaagggactcagacaatcatccatgtctcagtccctgctcgtattcttattctaaaaactaaagtacaattggttcttcatcaaattcaatcgcaatcgatttagttaacaaatcagcatagctatatgaaacacgttcgaacgcattttcatcttgatccaaatcaactacaaaaacggcaggaaaggtttctcttaagattccttttcgctttgttactttcttgcgcccagcttgagcgacaaccattaacttgtctccgatatgcccatcgagaccgttcttaatattggcaagtgtggttggcatatgcttcacctcttcgagcaatagtatagcatataaactgaaaaattgcaattataccattgtcatctagatttggcaattacttatccccttttttagcaaaaactggttgttcgttcaagcaatcactcaattgtgcgaattgttgaatactcaactgttccgcacgggtacttggggcaatatcagcttgatccaatgcagcgactaaccctgctttgacttcttcttgttttccaaattggttttgtaaattattccagagtgttttacgacgttgcgcaaaagcaccgcgaactaattgatcaaataattgttggttttgaacagtcaccaagggttcttgacgacccacaaattcaacaatcgctgaatcgacgttaggttggggtacaaaagctgtcttagggacaatgaaggctaatttaacttcagagtgcaattgaacagcgatactcaatgaaccataagcttttgaacctggtgcagcatcgattcgttctgcgacttctttttgcatcatcaagaccatgcgatcgattggtaaaccggcttccaataaatgtaacatgattggtgttgtgatgtaataaggtaagttagccacaattttaaggttgtgttggccatcaaaatgcttggcaatcaaggttggcaagtcagcttccaagatatcttgatttaaaaccgtcacattatgatagtgatttaacgtatcctttaaaactggaattaagcgatcatcaatttcaaaactcaaaacttgatgggcttttctagcgatttgttccgttaaagaaccaattccggggccaatttcgataacatcatcatctttagtaatctcacccgcttcaacgatttgttttaaaatcgtaatgttggttaagaagttttgacctaaactctttttaaatttaaaaccgtaccgtttaaggatttttctcgtacgctctgggtttgcaatgtcttccatgttagtctcctaattcttcgttaatttgtcttagtgctgcgccaaattcagcttggctcacctggaacattttaaggcgcttatacagttgtttactatttgtgtaaccaatatgcaagacttcccctaaacattcacgacgggccttggcagacggaccagcaatcaagccggccaccaataaatcagactgactaatttgttcgactgcatcttcatcttgcgtcaatagattttcgagtgcttgtttaatcgccgcgggtttagcatgttcaatccctaagctaccgcccattttctcaggtttagcttctgaccgtggtaaaaaggcatgttcaacacccggtacattttgtgaaataatcttacggattttttcaccatgaaaatcgggatcggtgaagacaatcacgccgcgtttttcttgggctaacgcaatttttccaacaatttcatcattaattgcggaaccgcgggtttcaattgtatcgacatccgggaatacttctcttaatcgtttggtatcatcgcggccttcaacaacgatgacttcttgaatcgtttttttcatattgctcctaacttaaaaatacggtgcgcatttgcataagtcgctgccgcaatttcttctggtgcgacctctcttaacttggcaattgcctcaaccacatagcgcgtatagcctggttgattttgcttaccacgataaggcgtgggtgttaagtaaggggcatctgtttcgactaacatcacatctaatgggcataatttggctgattcatgcacctcacgcgcattcttgaaactgaccacaccactaaacgaaatttgcatcccaagatccataaatcgtttcaaccattcagaatcaccgttaaaactgtggataatgccaccgcaatcacggacatctgtttcttttaaaatcttgtaggtatcttccaaagcatcccgcgtatgcactgaaattggcatatggagggacttggcgatttcaatttggcgttcaaaaacagttcgttgcacgtctcttggtgacgtgtcccagtgatagtccaagccaatttcacctagcgcaactacttccggtaactgtaattgttcaattaattgtgcttcttgaacctttgtataatcttttgctgattctggatgccaaccaataatagccgataacgctttgtattgttgtgctaaacgtagcgcaccgtcatttaaaaccgtatcagaacccacaattgccatctccgtaacccctaggtcagcggcctgttggataaagtcggcttcttgaccggcatatggcgtatcgtttaaatgcgtatgtgaatcaaatatctgcattttaatctccttttagcatcttaattttcaaagtcaaaccgtttcaaacgcactcttgatttaaacgtgctttcattaactgctttctgcgccttgccacatcagtcaaatcaccgactctgtcggtaattcacctgattaagcaagtactcaaaagcaacccgttaatgacgcactctaaacgtgctctgtaacccatatccttccggttaaccctgagcgccaaacaatcgctacgcgattgttcatccctctgtgttaatcctcaggatataaccagggttacgacgcactcttattttaaacgtgctttttgaaactgacttctgtgcttagcgtcactcgtcaaacaactgcttacagcagttattcgccgagctatgctaatgctcaaagtcaaagcgtttcaaacgcactcttttccataacaaagggctaaaagacctacagaatgtaaatgtcttttagcccttttgacgtttctgttattttaaattaaccaatttgtgaaccattcactaagttgctaggtacaactaccaattcaacatctgaaccgtgttctgctgaaagcaacatgccttggcttaattcgccacgtaatttacgtggttttaagttagtaacggctaagactttcttgccgactaatttttcgaaatctgggtagaattctgcaattcctgagatgatttggcgatcgccttgatcaccggcatctagtcggaatttcaagagtttatcagcgccttccaccttagaaacagctttgatttcagcaacccgaatttctgattgatcgaaatcttcgaatttaatggcatctttttcactgactaattcagtggccttaggatcaaagtctgcgacttcttctgcagcaacttgtttagctttcactttttcgttcaccaaaccagctttttgagcagccatcatttgttccttgatgtaagccacttcttcatctaaatcaagacgtgggaagattggtgtccctttagcaatcactttaatatcacttgggaagcggccgtaaaccatttcgcgttgtgcttcttgatcaaaatcaaggcctaattgcgcgaacatttcacgtggggcatgtgtcatgactggttgtaataagagggccacaatccgtaaactttctgctaagtgtgctaggacactatcgagttcagccttgcgactgtcatctttggctaaaacccatggttctgtttcatcgatatatttattagcacgactgattaattgccagattgtatcaagtgcatctgagaatttcaattgatccattaaagttgaatattgggcaattgtttgcgttgcagttgcttgtaagtcagcatcaaaagcggtgacgtcagcttggtaacttggcacgtgaccatcatcgtatttgttgatcattgcgactgtccggtttaagaggttccctaaatcgttagctaaatcgtaattaatccggctgacaaaatcttctggtgtgaagacgccgtcgttaccaaatggaatggcacgcattaagtaataacgaagcgcatctaagccgtaacgttcaactaacatttccgggtaaacaacgttccccttagatttagacatcttaccgtctttcattaataaccaaccatgaccaaagatttgttttggtaatggcaaaccaagggccatcaagaagattggccagtaaatcgcatggaaacgcacaatttctttacccaccaagtgaacatcagctggccagtatttattgaataattgatcgtcatccgaaccataaccaagcgctgtgatgtagtttgataaagcatctaaccacacgtacacaacgtgcttaggattgcctgtaacatgaatcccccaatcaaatgagatccgtgaaacggataaatcttccaaaccaggtttgatgaagttgttgatcatttcgtttttacgtgatgctggttcgataaaatcggcgtgttcttcataatatgctaataagcgatccgcatacttgctcatcttgaacttataagtttcttcggcaacgcgttggacttcgtgacctgaaggcgccttaccaccgatgaccttaccgttttcgtctttgtagacttccgttaattgtgattccgtgaagtattcttcatccgaaacagaataccaaccttcgtattggccaagatagatatcaccttgttccactaaccgatcaaaaatcttttgaacagctttcacgtggtaatcgtctgttgtgcggataaatttatcgtttgaaatttcaagcgtcttccatagtgcttgaatttcttcagccatcccgtccacgtaagcttgtggggccagatttttttcagctgctttttgttcgagtttcaaaccatgttcgtcagtcccggttaagaagaagacatcaaaacccatcaagcgtttgtaacgtgcaatgacgtccgctgcgatggtcgtgtatgagttcccgatggttaatttaccagaaggataatagatgggggttgttacgtaaaaagttggtttcttgtctgccatttgattcgctccttaattaaaaaaacgagaataaaaagttattctcgaccttttttaataatccatataagtactcaaagtatagcataaaatcaagcccgcgacaaaaagtgttctgcttttaaagcactaaaataacgacgtttgttccgggcccttgggcgctaaattctcaaacgtaatccctaatatttgttgtaaggctaaggcgttatcagcggcatccccaccggaattattattgaagataatcgcgacttctttagcctgcttggttagctgttgaaccgttgcggcaaaccgttgcaattcatctgcgttatagcgataaagggtccgttgtttgcgccacattgcgccaggattctgccaaccggccatattgcgcccatgcaaccggagcatcgcaaaatctggattcgtcacaaccggttcaaacgggacactattggtgggcgtctgcgcttcgtcagcaattacatgtgtcatttttaactgttttaaaaaagcgaacatgttctgcttatacgcttcatcgtaccaagtgccattacgaaactcgaccgcaatcggcacatcaggcaaccacgtgcgaatgcgtctcaaatactgcacattttcctgattcaattgaaaaaacggcgggaactgaaataggaccgccgttaattgccccgcatctaagagcggttgaatcgattgtttgtaacgaacaaacaattccttctcagtactagtgaagtccgtgtaatcttcctgtttggtcatcgccttatgtgctttgacgataaattgaaattggtgcggcacttgctgcagccacttagcgctaacggttggtgcttgtagcgcataataaaaactatcgacctcgacaattggtaaaaattgcgcgtaatcgttcaacgtcaactgctttttctccggcattagggactggtgctcactccaagtcgttaaaccgatcgtgatcatttaaccaccacctaatagcgtttaaattgttgcacaagttgtttttcttgttccgtcaaatcttttaaagtctcgattaactgttgaccgacctgcttatagttagtttgaattcgcgttaagcaaaattcaatcactaataaaaggaccatcaattcaatcgctcggccttctgtaaagttaacgcccaataagttcacttggctgtcggccgtaaagactttaataataatatagagtgaaaataactcttcaatgaccctaaagattctgaggccttgtaatttacgtttcaatacttggagcaccatcaaagtttgttctttcgtcatcatttaattcccctcctcaatcggaaatgcttcataggcaattaattgttccccgtgaaaatcggtgtagtaacgtttaacatttttggcgagcacttctggtaaaatcactttcaaatcggcaacaatgccgtagttttcttcagataaaacccattgctcatcgaatagttgtaagatgccttcgcgcgtgccaaccggatagagcggtaactgcaccgattccttaatctccgccaaaaagacatcaatcccggcgataaactcgccgtcaatatgccagtccaaccaccccgtattatacaaggtatactgattctgattgagacccgtctcttcaaaaatctcgcgttgcatgcccatttcggcggtttcgtcacactcgttcttgccgccaatcccattccaaaggccagcatagggctttttaagtcggtttaataatagtaatgtaccgcggtaacgaatcacggctaaattatagcgtcgtttagtcactggttaacatcctcgtctttttataattacctatattttagcatacttacccactaaaaaatgacgtcaggttcccctaaacgtcattttggcattaggcttctgcttgttctttaagagccttcatttttttaacttgatactgcttagcgattaaaatcatcgtttgatataaatcaactatatacggttcaaatttcgaatcttcaaccgcggccattcgttggtccatcactgctttttcacgttgaatgttggtcaaaccgatttgatgatcgaatttgatttgagcgatttcatcaaccactgccatccgttgttcaaataacgcggcaagttgttgatcaatcccatcaattttttgatattgttcttctaacatctgcattctcctcaattaacgtagtgaataaggcatttcaatttcatttaagaaatcacggactgataaatcatataagcgttggaaatattcgggtgttgcttctttatcagaaacactcaagacaaacgcattttgttgatcactcttaccaatcccaacataggccatttgttgcgttttattggctaacaagtggtctgaatgaaggatatcataaacttggcgcacatctaagcgcaattggcgttcactcaaaaccggtgttagcgtcaataattgttgtaagttagtggccgcaaaaccgagtgtctctaacacacgatcaaacgcaacccacaagttaatcacagcacgacgtaatgtgaacggtgaatcgattatttttcgttgtaaaacttggtataaaatttgggcttgtggataagccactggataatcagttgtccactggttatccaactgttgattaccgccatcgaaaaagataagtgcatccaatagcgttaagacgcggtaaatcacccattgattttctggatcatctttttcaggtgtcatattatcgcggaaaccttctagataggcttgtttggtttcggtatcgacaaaaccatgggccacttgttcttgttgaataatggtatgcactgccgcgttgtacaatgtcatcccagtggccattaattgttcatctaactgggcattttcagtcgccacatcttccaacacttgtggaaaaccggtcgataacaataataaatggagtaattcgtgtgatagtgaataatccacagctgtcgcatctgttaataagattgccaaactgccatcgtcattcatcacgcgttgtgcctggtcgtgttttaacatcccagaagcttcttgtgcaacccgaatcttaatcggttgtggataattagcctgtacttgtgcaactaaactttgaatctctggtgaaaagtcattttctgtcatgattacgctcccttaacaacatctattcttatcatgataagctaaatcacgctaaattaccaacggttcaaaccagattaaagcgctttaatttggtatactgtaggtaaccaaactaaaaggatgtgttgaccatgacagaaccagaacaccgcaaagtgattttatatctcgcgcaaagtttagacggctttattgctgaaaaagatggcagtaccgcttggctatccgcacttaattcatcagaatccgatgccgctattcaaagcttttaccaaggtgtcgataccattattatgggccgtaaaacttatgaacaatgtatcaaactggctgggacctatccttatcaggaaaaacaaagttatgttttttctaaaacactccacgataccgccgaccgcaccaatgtggtcaccggtaatgtgccagaattcgtccgccaattaaaagcacaagatggtggcaatatttggttagttggtggcgctgaaacgttcacaatgctcttaaaagcacaactagtggatgaactaatcatcactatcgctcccgttttactaggcgacggtatttccctcatcagcacccacttaacggacatgccattagaattaagtaaaacccgccaactaggccaattcgtagaactaacctataaaattaattattaaaacgaagtgcgttcaaagtagacacatgctgaggattagcttagtctagcggataagtgaccctgtcacttatttgatagacggtgctaaacgcaagcatgtacattgaaaagcacgttacaatctgagtgcgttcaatgcggttatgttctgagcattagcatagataggcgaatgaccgatgcaatcggttgtttgactagcggtgctaagcacaggaacatgcattgaaaagcacgttataaatctaagtgcgttcaaaggtggtcaaccttcgagcactagcttaacaagacggataattgctgaaagtaattatttggcttgtggttgctaggcacagaaggttacctttgaaaagcacgttacaatctgagtgcgttcaagtactaacttaaccgccatacgtccaagacaatttgtcttgggcgttttttatttggccactctcctcatgttaatcagtgtcattgacaattaccaaattgagagaacccaatgttttcaattccattacagaacgtttactgaaaacgagctggagatttacaaagtttccctatactgaatttgtacttcaatattgcaacgacataaggaggctttttcacatgacggatattcaatgcatcatttttgattgggcagggactataatcgattttggcagtttagatccagtattagcatttcaaagtgcgtttaacgctgccggcatccaaatcgataccgacagaattagacaggatatgggcatcgaaaaacatgaacacattgccaaactcgctaaaatgccagaggtacaacgtgcttggtttgcaaaatacaaacgcgggataaccgatgccgatcaattgcaactctttaactattttgaacaattcttgctcaatcgcttgagtacagaaacaacactgacccctgcagttcttcaagtccaaacttatttaaaagcacatcatatccacatcgcgacaacgaccggctacaccaaagcaatgctcgcaatcgccgctaagcaagcaggactacttggttatcatcccgaactgatggtttcaaaagaagacgtcgctgctggtcggccagcacccgatatgattaaccacatcatgactgcgttcaatatcaccgacccgcaaacagtcgttaaagtcggtgacaccgttattgatatgcaagaaggcaaaaatgccggcgtcttaaccgttggccttatcgaaagtagtagccttcttggtttaagccaagccaaactcatcgacctgcctcaaaaaacacggcttgctaaatttgcagaaatcactaaaaccctcaaagcggctggtgctgactatgttattcataatctcagcgaactacccgccattcttgcaaaataccaaacaccacaaaaggagcacgcctaatcatgaaccagccgtatttacttttaaccctcggcccactcagcacatcagctgccgttaaagaagctatgcaagtcgaccttagcacctgggatcaagactacctcgccatcaccgaagatatccgccaacaattagtcgcactcgcccaagccaagttagacacctacaccaccgttttattacaaggcagtggcagctacggcgtcgaagcggttcttaacacggtgcttcctaaaaaggagcaacaagcttatggctgtctgatgattgccatcaacggggcttatggtaaacgaatagccgatgaaataagctataaaaaaagaaccccacaaatgtggagttctcttagaaataaaggaaattatttcaagttaacgacagcgccaacttcttctaatttagctttcatttcttctgcttcgtctttagaaacgtcttctttaagagctgaaggagcgttatcaactaagcccttagcatctttcaagcctaaacctgtgatttcacgaacggctttgataactttaaccttttcttggccgatttctgataattcaacagtaaagctgtctttttcagctgctgcgtctgcgccagctgcacctgctgctgctactggagctgctgcagaaacaccgaattcttcttcgattgctttaactaagtcgtttaattctaagattgatgattcttttaattgatcaacaattgcatttacgtctaatgccatttttgtttcctccattttatgggtaatatttttttgataacacttttaactacacaattttaaattatgcagctggttcgtctttactgtcggcaactgctttaacagcatatgcgacattgcggactggtgcttgtaatacagaaagtaacattgataataaaccgtcgcgacttggtaatgtagccaaggcgttgatttcatcaagtgttgccactttaccttcgatcataccacctttgatttcaagtgcatcagcactcttagcaaagttagcgatgatcttagctggtgcaacaacatcttcgttagaaaatgcaactgcagtagggccagagaatgtttcatctaaaccttcgtaaccagctttgtctgctgcacgacgcaagtaagtgtttttaacaacttccatttgtacgccagcttcacgtaattgtttacgtaattcagtaacttgttctactgttaagccacggtaatccataactacgatagaaacagcgttattaaatttttcaacaactgtgtcaacaatttgtgctttttttgcaatgattgtttcgctcaattgattcacctccattagatttgtaaaacttgtggtcaagagtctcttataaaataaaaaactccatgtccaccaagacatagagagggatttcaacgtatcttcctcggcaggatattaagcctattggcacctgagtcttcggtagcataaataaccaactacaaatatagcatgtaaaaagcatgccgtcaatgctaatttaactataaatatttattatagcagcatcattttatacttattttatttttctgaaaatagcgtataaaatatagctattcaagaaaattaagatagtagaggtgtttctttttgaacaatattttagttatcaatgctggtagttcatccctaaagtggcaactatttcaacaaaccgatttaagcttagtggctagcggtttgatggaacggatgaacaccccagaagcgcgctttacttttaaattcaacggccaaaaagaacaggtcgcaatcgctaatctaacctatgaagatggcgttattcgtttattgaaacaattacaagacaatgccattattgactctcctagcgacattgtcgcagttggtcaccgagtggttgccggcgcaacaacgtttgaaaaatcaacgttaatcaccgctgataatttggcaaccctcaaggcactcgataaatacgcaccattacacaatcctgttcaagtggattgcattgaaaccttaacgcatatcttaccaaattcagtgcccgaagtcgctgtcttcgatagtcaattctatctagatatgccagatgcaaccagtttttatggacttccttatgaagatagccaaaaataccaaatccgtaaatacggcgaacacggtattagtcacggctatatcttacaagaaacagctgactttttaaaccaaccagtcgcagatttaaaattgatcaccctacatcttggtggtggttcttcaatcacagctagccaaaatggcaaaccagtcgatacatcaatgggcttcaccccacttgaaggtcttccaatgggcactcgtgctggttcgttagatgctgctattgttcccttcttaatgaatgaattaaataagagtgccgacgaaatcatcacgctcttaaatacagaatcaggaattctcggcgtttcaggtatttctgctgatatgcgtgatatccaatcatcattggcgactaatcctcgtgccgaattagcttatgatatgttcatcacttctgctgctaaatttatcggtagctactacgttgaacttggcggtgccaacgtcattactttcacagccggaattggtgaaaatgatgctaaaatgcgcgctgatgtctgcgaccgcttagccgttctaggcgttaagattgatccagaacgtaatgaacaaggccatagtgcgcgtcaaattagtaccgacgattcagcaatcaaggtcttgatgattcctactaatgaagaattagcgattgccaaacaagttaaagcactcgtttaaatttaatcgataagcatttaaggttttacaccttaaatgcttatttttgtacctaaataattcgcttttgtattaataaacgaactttaatcgtattatttttatgatttttcgtatttagtcttaaaaaataaaaccttttggtgtacaataaggcaatagttcttatttcaaataaattaagaggtgcattatggataagagagttgattctatatcagaaacacgaacgaattggttagaacaccaattcaaaattaaggaaagtggttcaacccttaagactgaaatcatcgccgggattacaactttcatcgcgatgtcatatattttattcgtgaaccccacaattttgggggacgctggtttagataaaggcgccgtcttcgtcgccacagcacttaccggtatcgttggttgtttagcaatggccctcattgccaactacccaatcgcagttgcccccggacttggtagtaacgcctttttcgcctactctgttgttttaggcatgggcattccttggcagacagctttagccggtgtttttgttgcttccttactcttcatgctcgtcactgttttaaaagttcgtgaagtggtcattaacgcgattcccgccaatctcaaatctgcgatggccgttggtattgggttattcatcgcttttaccggtttaaagcaaggcggtctggtggttgccagcgccaaatctttcgttaccatcactaactggtctaatccgcatgtttggttaaccgtcttcggcctaatcttaacagtcgctttactcgctcgtaaaattcctggcgccctcttcattgggttagccgctactgccatcatgggtgtcgttaccggtttaatcgcaatgcccaccggtgtcgtttcttcaattcctagcctcgcaccaactttcggtgtgtctctcattcatcttaaggatgttttctcggttcaaatggcggtcgttgttctcgtctttttcttcagcgtgttcttcgacacaaccgggaccgtgatcggtttagcccaacaagctggcttcatcaaagataacaaaatgcccaaagaagtcggcgaagccctcttcgcagattcaacatcaatgatcgccggttccgtttttggctcaacaccaactgcttgttatattgaatcttcaactgggatcgccgttggtggccgtaccggttttaccgcagtcgttgtcgccatcatgttcgctcttagtttattcttctcgcctttattagcagttgtaacatctgaagtaactgctcccattttaattatcgttggctcattcatgattaaatcaatcgccaacatcgattggtctgaatttgaaacagcattccctgcttttatgatcatcctttgtgtcccattaacctacaatatctcatacggcttggcttttggtttaatctcataccccatcacaatgattgcggctggtaagggtaaaaaagtgcacccgattatgtacgttgctgccctcttattcttagtcttactctttacaatgcacgaattacccggtaaataaaaaggagtttttaatatggataaatcaactttaaagcaactcatcgatcaagctgccggtcgcaaaccagccgacacgatcattaaaaacgctaaaattgtcgatgtctataatgcccggatcatcgaaggcactctcgctatcgcggatagccgttttctggggattgacgcagcttatacagccgataatgttattaatgcacacgggtcaatacgtcgtacccggtttgattgatcctcatattcacatcgagtcagctaacgtatcacccgccgtttttggctcactcgtgacaccgcatgggacgaccaccattctcgccgatccccacgaaatcgtcaacgtcgccgggatgcgcggccttgaatacatggttgcttctgccaaaaacacagcactcgacattaagtacacgatgccatcttgtgtgcctgctgcgaatccaaccctcgaaacatctggcgctgtcattaccgcagatgagattaagcaatcttacgaccaaggactaacctatggccttgccgaattcatgaactatcccggcgtcgtcaatgccgacgatggtgttttagatgaattattagtttcgctgaacgcccgtaaaatgattgatggccattcacccgcactacacggtcaggggctcaacgcttatgcagccgcaggtgttcacaacgatcacgaatgtacacaagttgatgaaatgctcgatcgcatcagtcgcggtatgtacgtctatctccgctacggcactgtttcaaagaatatgccaaccctgttaaagggcgttacacctcaaaacgcacgcttttgttgcctctgtggtgacgatttacaatccgtgacccttcgcgaaactggccacttggacgaaagcattcgtgtcgccattcaaaacgggattgatccgctaaccgccattcagatggccaccatcaacacagctcaatgtaccggactcagcgatcgtggtgggattgcacctggtctcaaagctgatttcttattggtcgacgacctcgaacacttcaacgttaaccaaacctttattgacggtcaaaagattgccgcaaacggcgcttacttattaccgactgacgattccgtcgccggctttgatgatcttctagaaaccgttcatctcgacaatttttcagctgaccaattaaaactcaatctcaccagcgataaagcccacgtgattggcttacaaagtattagtcgtactcaaaaccttgtcttacctgttgcacacgatgcagagggtgatttccactacaagcctagcgaagatatcgttaaagttgccgtggttgaacgacatcatttaaccggcaacgtcggcgtgggtctcttaagtggcttcggacttcaaaatggtgcgattgccaccagcatcggtcatgatagccataacttagtcgttgttggtaccaacgacgctgatatggtcgtggccatcgatgcactcaaagcttgccaaggtggcggtgttgccgttcaaaatggtcaggtaatcgcaacccttccatttgtaattggtggtttaatgagtactgaaccaattgattcactcatcgcccatcaaaaagcatttaataccatttgtcatgaacaactcaacgtcactgcccaatttgatccgattatgaaactcggcgctatgccactcgatgtaattccaaacttacggattaccgataaaggcttagttgatgtgactaaatttgaaattattgatatcaacgcctaatcaacggcataaaaaaagcgttcatgaagtgaacccccgatattggaccaaaatccaataccgggggtttttatattgaccaaatattctaaagagttaaaaatgaaagttgttcaggattatctgacttcctccataggatacagattaattgctaggaaatacggtattaaaagttcttcatctgttcttttttggattcgacgttatgagacctttggtctaaaggggctcgatgtcctatcacctgataaaatatttgatggctcatttaagatgaatgttttaaaatggatgaaaacgaataaggcttcttatccgaaaaccgcacttcattttaatatctcaaacgtcgggaccatctggcaatggcaacatatttgggagactgagggtgctgatgccttatatcgttccaaaggacggcaaacaattatgacagctgataaacaatcgaaaaaacggcagcaaacagaactagaacgtctgagagaagaaaatgaattactacaaatcgagaatgaatacctaaaaaaattaagagccttagttcaggaagaagaagacaacaagcgcaagtcatccaagagctaaggcttaaacataaattaataaaaattctaaaagtagttggtatggctaaaagtacgtatgaatacattattagccatgaaccgaacggttcatctgaccaatctgttaaacaagccatccaaacaatcaagaagaatcatccagcgtacggttatcgtcgtgtaactggtgaattacatcgtatgaatatcttagtaaatcataaaaaagtgcttgtcttaatgcgagaactacaattactatcaactgcatttaacaaacgtactcgtaagtataattcatatagaggtaatgttgggaccgttgctaagaacttaatccaccgtcgtttcttcactgatcgtccctatcaaaaactagtgacagatgttactgaagttcgctggggaaccaagacaattgacgaacgtgcctatttcacatgtatttatgatttattctcaggtgaaattcttagccatcaagttagcagacaccctactgttgaatttacaacaactgttttaaatcgagcagttaagaaaatccctaagaatttaaaataccggacaacagtccactcagatcaagggtttcaataccagcatcaagattggactaatatcttgaaagaacatcgcatttttcaaagtatgtctcgaaaagcaacatgtttagataatgcatcaatggagagctttttccatattatgaaagccgaagctttctaccaaaaagaaaccgatacttatgaaacgctagtttcacaaatatcggtttggattgatgattataatttttcaagaattaaaacaaaactgggttgtaaaagtccggttgaataccgaatttttacaacccagaaagctgcttaaagtttcgtccaatatttagggttcacttcatcatccgaaaggatgagcgctttttgcattaccaacttagaagctagcaacgtcaactttgacaccagggccaaatgttgagctaactgataaacttgtaatgtattgacctttagctgaagcaggacgagctttgatgattacgtcttgcatagctttaaagttttctactaatttagcagcatcgaatgataccttaccgattggtgcgtgaacgataccagctttatcaacacggtatgccacttgaccagctttaatgtcgttaactgctttagtaacgtccattgtaactgtaccagtcttagggttaggcattaagcctttaggtcccaagacacggcctaaacgacctacttgagccatcattggtggtgtagcaacggcaacgtcaaagtctaaccagccgccttggatcttttcaactaaatcttctgcaccgactacgtcagcaccagcagcttcagcttgttttgcttgttcgccttgagcgaaaacaataacgcgttgtgtcttacctgtaccatttggtagtacgacagcaccacgaatttgttgatcagcttgtttaggatcaacgtttaaacgatatgcaacttcaagagatgcatcgaattttgcaaaatcaactttctttactaagtcgattgcttcttcaacagtgtatgctttagtagcatccacttgctttgcagcttctaaataatttttaccttttttagccattagggttttcctccttgcaattgtggtgaacggtttttgacctcccacttgatttttcaactttcattgaaaatccgactgaaagtgtcaagcatgaattaaccttcgacagtgaatcccatgcttcttgcagtaccttcaaccatgcgcatagcagcttcaacgtctgcagcgtttaggtcttgcattttagtttcagcgatttcttgcacttgagctttagttacagttgcaaccttcttagtgtttggttcgccagaacctttttgaacaccggcagctttctttaaaagaactgctgctggtggtgtctttgtaacgaaatcgaatgaacgatcctcgtatacagtaatgacaacaggaatcaataaaccagcttggtcagctgtacgtgcattgaaatcctttgtaaagcccatgatgttgataccagcttgacctaaagctggacctactggtggtgctggagttgctttacctgcaggaatttgaagttttacgatgtttgctacttttttagccacgaaacatacctccttaagtccgtgatgtggttaagatggccattatatttggtctcccactagtgtatgaaaacatactctcataatataccaatcaattctgaaaaatgcaagctcttttaaaattagtcttgccacaaaaaatcactaattgcctgatcgactaaccgattttcgtgcaacatgctgtgagccccaccggcgcctctaacaagcatttcttgataccggtcgattcgcccccgtaataaactacgcagcgcaaaactgctatcaacggccactgagccgtcgtgacggctagtgcccaacaattcgccagcgacattcaaaatactaattgacgttgggaaatgcgccactcgtttggctaaataattataattagccgtttttttacgcggtccccgttgcgttaattcgctccaaaagaccgttgcagtatccgacccaatcgacggatcattgaccggtgctgctagtaatacgactgctttaactggcacggcagtcggctttaataagtaacgtaatactgtgatggcccccatcgagtgtcccaccagattaatcgtggttacgtcgtaatctttttttaagatagccataatttggctgagccagcgaacttgatcctgcacatcagcgtgattattttgaaataggacttggatcgtcggattactggccgtcaattcttgtgggcctttaaacgttaaggtcccatcggcagcaaccttgatgaccaatgcttttttggcgacacccgttttttgcagacgcattaataaatgccccatagaataccgattaccccgataaccgtggataaacaacgtcggtgctgtttcataatgcgttagtcgtggacaccagtgatgctgtacgtgagctaatttataataatcgagcccaattaagcacgctgctgctacaactaaaataacaatgactgctaataactgattaataatctgccacatattcatcacatcattctgtctaaaataagaagtgcgtttgaaacgctttgactttgagcattagcacagctcggcgaataactgctgcaagcagttgtttgacgagtgacgctaagcgcagaagtcagtttcaaaaagcacgtttccactattaatattcgactatcaaataagggaccgcaacaaaaattacttttgtcacggtccctcgattattacttaaacgtgctttcaccagtagctttctgtgctttgctacacttgtcaaactggcgattacatcgccaattcgccaagttggcaaatgctcaaaagctaaccactggtaacgcactcttaattaaacgtgttctataagccatatccttgtggctaacgccgaatgtcaaccgattgcttgcagcaatcattagccactctctgttagtcctcaggacatacccggcttatggcgcactctaaactaattcgtctacttgatcgtagtctaattctgttgccgtttcacggccgaacatatcgatattaacttttaacttcatcttttcgtcgtcaacttctgtaatttgaccaactaaaccagagaaagcaccatcaacgattttaacagattcgcccactttgaattcaacatccaaatgacgtgtgctcatgcctaattgacgtaaaatttggctaatttcatcgtccaataatggggctggtttactaccggcaccgtgagaaccaacaaagccagttacaccaggtgtattccgaacaacgaaccaagcttcgtctgacatcaccatttcaaccaaaacatagccagggaaagttttcttcatatcaactttatccttaccatttttgatttcatgttcttcttcttcaggtacaacaacgcggaagatgttgttttccattcccattgattgggcacgagattctaagttcgccttaactttgttttcgtagcctgaataagtgtgtaatacgtaccagcttttttcgagtgattcaaccatgtttgttctcctttaaataccaaaataaaaaaactccgaccacgcgaagttttctgcttgccacaagtatagcaaaaccagcttcattaagctagttttaaaaaataaatagttcaagaagtttgagaattgctaagtcaacgacgccaaagaaaattgcgtataaaactgatgtcatcacaacagttgatgtatccttacgcgtttgtttggcattaggccaagtaacaattttcatttcttcaacaacgctttttaaaaacttaatcatcttcatcctcctatgttaacgtgtttctttatgttgtgcgtattgtccgcaatgtttacaatatttgtttaactctagacgttctgtccgattcttgttttcagcaacgtaatagttacgtgaaccacagacagtacaggctaaggcgactttcttaacacccatgactaaaagcccctctctaagtgatgtttatcccattcactttatcatgtgcaggcgaacctgtcaatcttagaatccatcaacaaaaacggtgaacccgtttagtccagtcccaccgcttttggttaacgattctcttgataataccgttttaacttagtctgacaccttgattggccccgtttcaactgatcaatcgtacaatcgagttggcaacaagcttcatcaattgaaagctgcccggtcagcacccgaaacgacactaattcaaaaggcgacagcgtttcaagataacatcgcaattcaaactgcgattgatagtaagtcatcgtatcttctgaaatcgcgtcgtgttccggtcgctccgcaatcaatactgcctgacgatcacctcgccgtttttgtgcaagttctcgtcgtagtaaatttaaaatgtggtttttaaaccgtaatttatagaaactcccaaaacttttgcctttttgacaatcgtaacactggcaagtttcgtaacaaacaatccgggcttcttgtaaccaatcgtcttcatcgaataaccggatataatatggcgccacggtgtgatacaccatcggcaaatacgccttgaataatacatctagtgcttgtgaatcattctgagccactgctgcaatcagcattttgtcacgctttgtttgttccattgaccgaaactcccttcacgcaacaaccatactgttattttagcaagagtttgcccaatctgtaagcgaacgcctgtttaatcagtcttttcgtcactcaattggtcgcgcatctgcgctaaacgttctaattgatcgtcattccacggccgattacgttgcatcaccttactgtgataacgtttggcatcatggtcaatctctcggtgcgttcgtttaatctcacgatagaaatcatgcgatgatactcgcaaagccccccgcgaaaagattgtccattgttcagcctgatcgcttgaaacgacagtgacctgattaatcggtgacatcaatttaccggctaaggcttcaatataactatcagctgtttcatcttcttcagtaaaaacgacctcaagattatattgttcatagctttgtttaatccctggcacatacatcgcatcaaagacgaggataatttcgatttcgcgaaacttccggtactccgataatgtttgcaataaactatcacgcgcatctgccaagtgatcattttgttttaacttatttaattcaggccagttaccaataatattatagccatctgcaattaaaatctgctttttcataagctataccaaaggttgacggctattataagcctgatacatgagaacccccgcagcaacactggcatttaaactttgcacgtgacccaccattgggattgtcaaagtttgatcaacttcttttttaacgattggtgaaaggcccttgccttcgttaccaatgattaaaccgattgggcccttagcatcccacttacgatagtcggtgccggccatgtcggtgccaaaaatccagagaccgcggcctttaagttttttgatttcttgcgttaagttcgtgacgcgcgcaactggaatatgttcgatcgcacccgttgacgttttagcaactgtggatgttaatccaacagcacggtgttttggaatgataattccgtgtacaccaactgcatcagctgtccgcatgattgaacccaagttatggggatcttccaagttatccaagattaagataaaaggttcttcttcttgcgctttggccttagcgaaaatatcatcaacactcgcatattcaaacggtgcgattgctaagataatcccttggtgattttggcgatcactcaataagtccaacttgttcttagggacattttggatgatcaatcgtttttctttcgccaatttaacgacatcgtgtacgaagtcggctttcaacccatcttgaaggaagattttgttaatcttcttagcatcgctcgtcttcaatgtttctaaagaagcatgtttcccgatgacgaaatcagtttgttcttcaaccgctgcttcttcgacaggtgctgctggtttcttgttagctgggcgccgtgttggcttagcagtatttttagccgtccgacgactgttaaattcattattcttctggttataagattggttattattttttctcatgggtcctcccagcgtcgacttgttgaatacaccagtgggctaattcagcgacgcgctcttgttgttcagttaagtatagatagccaaaaactgcttcaaagccagttgaggtccgataagtcgaaacactcgtattcttggctttcgtataacttttggcatttctaccgcgtttaaaaatattcatttcttcttctgttaaatagttgtcatcgatcatcaaaccaatcaaagcagcttgcgctttagcagacacatagtgtgttgcaacttgttgcaagcgagttggtttggttaagccgagttctaataaatgggcccgcacgtaaacttcataggctgaatcccccatgtaagctaaggcaatcccgtttagttgtaaagcatttttcatgcgcgtctccatctcattccttgtggtgtatcttccaaaataatcccttgatcctttaattggtcccgaatcgcatcactcttcgcaaaatctttagctgctcgagcggcttggcgttcttcaattaaactttcaacttctgtatccaataattggtccactttaaacacaacaccaaaaatggctaatagccgcgttaagcgagttgccaatgacgttaatgtatcggctttaaccgttgttttttccaaatattggttacttaatttagcaagttcgtacaattgggttaagccattttgaacgttaaaatcatcgtccatcgctgtgacaaaagctgtttccaattcagctaccttatccatcacaatttgatcttcgcctggttcagccgttgcttgacggaaagccaggttatcaagtgttgtcttcaagcgatccaaattagtttgggcttctgccaacaatgattggctgtagcgaattggccgccggtattgcgtactactcatcaagaaacgcaatgcttgtggattaacttcttgaatcaaatcgtgaaccgtcacgaagttaccaagtgacttactcatcttttgatcgtcatccccaactgttacaaacccattgtgtaaccagtaatttacaaaggttttgccagtcttggcttcactttgggcaatttcattttcgtgatgggggaattccaaatcttggccgccaccatgaatatcgatcgtatcgcctaagtatttagtcgacatcacggaacattcgatgtgccagccaggtcggcccttgccccaaggtgattcccaagcaatttcgttgcctttttcagctttccataaggcaaaatcgattggatcttccttacgtaaggtttcttcagtagccgtatgttcgctggcaccttgttcgagttgatcaagatcttgaccagcaagatgaccgtaagccttaaacttgcgggcacggtaataaacatcgccgtcaacagcataagcataatctttagcaatcaaatcttgaataaacgctacgatttcttcaatattatcagttgctcgtggattaagcgttgctggttcaatattgagggctttagtgttttctttaaaggccgcaatgtagcggtccgctaattcaggcacggtgatgttttccgcgttagccgctttaatcatcttatcgtcaacatccgtaaagtttgaaacgtaatcaacttgataaccgcggtattcgagatagcggcgaatcgtatcaaacgcaatcgcactacgcgcattaccgatatgaatatagttatacacagttggcccacagacatacatcttaacgcggccttcttcaaggggtttaaaggtttctttttgacgtgtgagggtattataaacagtaagcatcgaatcttcctttcttaaacgtgctttcattaacagctttttcaggcatcccccttcggttaaccctgaatgtcaaacgattgcttacagcaatcattcgccattctgtgttaatcctcaggagataatcgcctaaaaagagcactcttccaaataaaaagcgccctttgttaattaacaaaagacgccggttgagcgtggttccacttttcttcgcaaaaatgcctcaagcagataacggtgtcccggctagcagccaaagtccactagcatctccaaggtgcatttcgactagcccaattacttcttcacagcgcccagaagctttctgaaaatccggctaatctacttcttctcttcatcaatttatacaatttagttagtctcaataataccgattattggtgaccgtgtaaagtcatctgaatgcttatttttcattcaagcctttttgttgatgcgctggtttggcgaaaatcatccgcccagcagcagtttgtaaggcacttgtcacaatcacatctaatggtttattaaggtaatgttggccatcttcaacaacaatcatcgtcccgtcttcaaggtaagcgaccccttgttgacgttcggttccggctttgaccaccgtgacggtcatcgcttcgccaggtaagacagctggtttcaacgtattggccaattgattgatattaaaaacaggaacgttttggaattcacagactttatttaaattgtaatcatttgtgaccacaattccgtctagcaacttcgctaacttgactaatttgccatcgacttccgttaaatcttcgaaatcaccatcgtacatttcgacagataaactttcgtccttttgtaattcattcaagatatctaaaccacgacgaccacgcgcccgttttaagttgtctgcagaatcggaaattaattgtaattcatgtaatacgaagttcggcaccatcaacgtgccttcgataaagccggtcttagcaatttccttaatccgaccatcaatgatgacactcgtatccaaaatcttgtacttgcggaaattatcgtctactttgcgttccaagacatcggtattacgcttcttaggttgtaagaacttacgccattcatctaagcgggtcgtccccaccttgaagcctaagtaaccgagcgcaatcatcaataggattggcacaacagtgttcagaacaaaaatcggcatccggtataacggaatcgaaacaacatttgctaataacaagccaattaatgagaaaacactcccaaataataggaaactaggtgattgtttaaacaacgccttttccaattgacgcatcgcccgtaacatcggattagccaacaccaggaataaaagataaaaaataattgcacctaacacggcattggtaatgccattattgagatatgtgactaattctaaatgaacaactcgccagaattccggaaaggccgtaatccctaaagcaccccctagaattacaaagacaattcctaacactcttcttttagttaatggtttttgttgcatcataaaacctcctctcgcaccaacttatgcctagttgaatactttttttaaagtttctgcaatagtggtgaccccaacgacttgaatatcagttggtggatcccaaccttgcaaattatttttaggaacataaatccgtttaaaacctaacttcgccgcttcgccaacgcgttgttcgatccggttgacccgccggatttcacccgtcaagccaatttcgccgacaaaacaatcggttggtggaatttctttatcgcgataactggaagcaattgaaacggccatcgccaaatcaatcgctggttcatctaacttaacgccaccggttgctttaagataagcatcttggtttgaaagcatcaaactcgcccgcttttctaaaaccgccataatcaatgacacccgattatgatctaaccctgaagaggtccgtttcgcattcccgaacaaggttggggtaatcaaagtttgtaactcaaccaagattggtcttgtcccttccattgaaaccacaactgctgagccagtcgcaccggctagtcgttcttcaaggaaaatttcggatggattagcgacttcttgcaagcccgcttcccgcatttcgaaaatcccgatttcattggttgaaccaaaccggtttttaacagatcgtaaaatccggtaagtgtgatgggtgtcaccttcaaagtacaacacggtatctaccatatgttccaaaatcttagggccggcaatcgccccttccttcgtcacatgtcccaccacgaagatggtaatttgattcgttttagcaatccgcatcaattctgcggttacttggcgaacttgcgaaacactcccgactgcggaagtcacttctggttcactcatcgtttgaatcgaatcaatcacgacgtattccggtttgagcgtttcaatttggtggcgaatattacccatatccgtttcgggatacagatacaattgatcgccattaacccctaatcgattcgcccgcatcttaatttgtgaggcactttcttcacctgaaacgtataggatcttacccactttttcaagttgccctgaaacttgtagtagcaaggttgattttccaatcccaggatccccaccgattaaaatcagtgaacccggaacaacgccgccacctaaaacacgattcaattcatttaattccgttttaacacggggttctttttggatattaacagtactaattttttcaggttcagtggcgcgccctgaaattgtgaaatttgattttgccgctgcggctggttgttcacgttcttcaaccatttggttccaagcaccacaattcggacagcgccccaagaatctgggggaactatagccacaattctggcagacaaactgcgttttaactttagccacaagattctcctttactacccttattgtctactattttagcacatatcggcgatcgattgccgttagcacggactagcgaccagatgaaccaaagccaccggtccgtttagttgtcacagccacttcatcatcagctacaaggtatggcatgaaaatgccttggccaattcgttcacccttacgtaaaataacatcgcgtgggctgaagtttaacatttgaatgaagatttcaccttcgttggcatcattgccataataatctgaatcaataatcccgacaccatttggaatcactaacccttttttcaagggattgcttgaacgattggcaatcattaaatattcgtcgtcttgcatatacgccttaatcccagttggtactaggaaaggtttcaacgtcttagaagcccgttcaaaatcatcatcaactagtggtttgccgtttcgaatcatccgaaatagacggacaaaattataatgccagatggatggtaaaacgaagtcctctgcacaagcaaaatcgtatcctgctgaatgagcagtcgaccgcactggtaaacttaagtttgctgattggtatttggttactatttcgaatcctcgttttttcatctaaaaaagctcctatatattaacacctaatttggcgctattttttactactgtatcataccatgaaaaccaacggacttgaataatccttccgaccgatttaatagaaattttagcaaaaaacgcccattttaaagcgcttttttaccagttattgcgtataatagaactattaacaatagaagaggtgtcttaatggataagaatgcaatgaaaaaaatggccgctgaacgttcagtggactacgtcgaagataatatgattttaggactcgggactggctcaactgtcgtgtacatggtcgaagcactcgctaaacgtgtgaaagccgaaaacctccacctaacttgcgtctgcacatcaatcagaaccgcagaacaagcaacatcgctcggcatcccggttaaagcgctcaacgaagtcgatcatatcgatttaacaattgatggtgccgatgaagttgatgataacttccaagggattaaaggcggtggcgctgcccacttatttgaaaaactagtggcaacaacctcaacccgcaacatctggattgttgatgaagaaaaagtagtcgatacaatcggccgcttcccactccccgttgaagtgattccttttggcagtcaacaagttttcaacaagttcgttaaagaaggcctcaacccagaattcagaacaaccgaagacggccaacgcgtcttaacggattcaaaaaatgaagtgattgatctgcaccttgaaaaaatcacacatccccacttactagcaacttggttaagcgaacaagtcggcgtcgttgaacacggcctattcttagacctcgtcaacgaagtcgtagtaggctcaccagaaggcgtcaaaatcttaaaagcaagataaaaacagagtgcccttcaaagtggtcatgttctgaggattagcatagtatcgtgaataagcgacacagtcgattgtttgcgatacggcgctaaacgcaggaacatactttgaatagcacgtttcaacccagagtgcccttgcaagtgtttagattcttagcatttgcctaggccagtgaataagcgacgcagtcgattatttgcgggacgtagctaaacgcaagaatcaggttgatatggcacgttttggatagcctactcttcaagtgactagattatgccaatcccccaataaccatcatactcgttatgatggttatttttttatctttaacgtcacaaatcaattctcatattaaccgttttcttcctcatttttaacttttcaataatatcattatcccatctatctcatgtttacttctcccattaaatcaactagaattagggtatattgaaattaaggagtgattagatgacccaagaaattacacatgctaatttaatcaagatgcgccaagcactcgccgacatgccgcaagcccaaacactacgtaatgccgtcatgaataacgggattaacgcggtcgctcagcgccctgatgctgccgtaacccttgacccaacctactcgatagacttgccaaccggtgacgtcagcttccaaaaaaagagtggtcgttgttggctatttgccacactcaatacacttcgtcatgatttcgaacaacaatataacgtgaaaaactttgaactttctcaaaactacctctcattctgggatcgcattgaaaaagccaatcttttctacgaaaaaatcctagcaacagctactaaacccattacggatcgcgaagtcgccttcgcacttgctggacctgattttgacggcggccaatgggacaatgcagtcgcattaatccaaaaatacggtgccgttcctaaatccgtcatgcctgaaacatacaacagtgatttaaccactgaattcaacagtaccttaaaccttaaattacggacagatgcgattaagctccgccaattagttgccgatcaagcaccttctgacaagattagcgaaactagaacggcgatgttaagcgaaatttaccgtctcagcgtttacgcttttggcgaacccgtcgaaacattcgacttcgcctatcgcgataatgatcaacaatatcaccttgaccaaggcctcacaccactgagcttctatcaaaaatatttgaatcgcaattttgatgattacgtcacagttgtcagcagcccacaagcaagcaaacaatacaaccaactttacagcttagactcacaagataccgtagttgaaggccatccaatgcgcctattgaacctcccacccgatcgtctaaaagcactcgccattcagtcacttaaagctggcgaaccaatttggtttggtaacgacgtgctcgccgacttagaccgccaaaaaggttggttggacagtaatctttatgactactcaagtctcttcagtattgatttaacaatgcctaaagaccaacgactcgattatcgccaaggcgttgtttcccacgcgatgactttaaccggtgtcaacctagttgacgaccaacccacaaaatggaaagttgaaaacacttggagtgacaaggtcggcaataagggctacttcagcatgagcgacgcttggtttgatgactatgtatacgaagtggttattaagaaggaatacctcacaaaagaagaacaagccctactagaccaaaccccaatcaaactagacccatgggacgcactacaatagagtgcgtcatcaacgggtaacttctgagcacttacagcacttgacgaattggcgatgcaatcgctgatttggcaagtgaggtaaggcggaagacgttgttgatgaaagcacatttaaagaaacgagtgcgttcaagcacgttaatccaagttatatattcaatcatcaatctattatcaccaaattccagaggaggtttttcatatggttcaacccattacagcaaaagatatccaacaattcaaagccgacttcaaggcagttccacaatcaaacgtcattaaaaatacggtgatgaacaacggctttttagccagcagtcaaaatacaacttcaaaggctttaatggacccagtcttttcaatcgatttagacactggtgccgtttcaaatcaaaagcaatccggtcgttgctggatgtttgccgcattaaatacgatgcgccacagcttacaagcacaattcaagattaaggatttcgaactttctcaaaattacacgaacttctgggataaattcgaaaaatcaaactacttctacgaaaatgtcttaaagacagccgatcaaccaatcggcgatcgcaaagtcgactttttaatgactacgccccaacaagacggcggtcaatgggatatgttatgcgccctgatcgaaaaatacgggattgtacctaagtcggtcatgcccgaaacttataacagtgaaaaatcaagcgaactcaacagcgtcttgaaccttaaacttagaaaagatgccgtcacacttcgtcaactggttgccgatggtgtcagcgaagccgatatccaagcaaagaaagatacaatgttgaccgaagtttaccggatgcttgttttcgcattgggcgaaccacccgttgaattcgacttcgaatatcgcgatgatgaccataactaccacattgaaaaaggcctcacaccacaaaccttctaccaaaaatatgttggttgggacctcgaaaattatgtttcattaatcaattctccaacggcggacaaaccatacaatcacttatacagcgttgaaatgctcggcaacgtggttggcggccgtgaagttcgccatttgaatcttgatatcgatgattttaaacaactcgccatcaaacaactccaagctggcgaatcagtttggtttggtagcgacgttggccaatcatccgaccgcaaacttggtatcatggatactaaaatctatcaaaaagcagcattacttaacatggacctttcaatttctaaaggtgaacgcctagattacggtgaaagtttaatgacgcatgcgatggtcattactggcgttgatatcgttgatggccaaccaacgaaatggaaggttgaaaactcatggggcgataaagtcggtactaagggctacttcgtcatgagcgacagctggtttgacgaattcgtctaccaaatcgttatcaacaaacgcttcttaacaccagaaatgcaacggattgaaaaagaagaatacgatcacccaaccgttctcgcaccatgggatccaatgggcgcattagcaagtcgctaaacaaattaaaaaggtcaggacaaattgtcctggcctttttgatttgttctaatcctgtgtcccaacaactaacaaactatcgtaataaatttgcatcatcatttgccaatcgctgaattgaagccattcatcacccttatgcgcgatgcccttttgtcctgggaaagaaggcccaaacgcgatgatattcggcaaagcgcgggcgtaagtcaccccggtcgtcgtcaccggtgtgccatctaagcccgcatcagccgcataaatcgccgataattgttgaataaatggcaattgcggatcggtcacttgcgatggataccgccgcttaaccgtcaccgtcatccccggtaacaacgccgcttcgatgccggctaacaattgttcttcagtcaccgaaatcggataacgacacgttagatgacaactcaactgttgcgactcaatcgataatccgtaaaaggctaactgcaaagcacccgaggccgcatcttcaaaatttatccccaagttttccccagttgattgattaccaattttagcattaagccactgatagaattggccggtctggcccgtcaattggctagcatctgctactaatttcggtagcacattatccgccatttcaggtgcgttacttggcgcctttttgccttgataagttttgaccgtcccatccgctaaaagtaggcgagcgtgatctggtaaataacttttggcaaacggcccgtcaatcgctgtaatttggcgctcagagccatctgtaatcggcaacgataactgaacgtctaacaaaccacgttccccgtaaacggccggaaacttgcaatctggcgtaaaaccggcgtacggcgctgcttcttgttgtagatacaccggaatatcttggctccctgattcttcatccgtgccaaaaataatccgaacccggtgcttaaatgttattttttgcgttttaatcagataaagtgcaaacaatgtggataagagtggccctttattatccaaaacaccacgtccatacaagaagttatccacttgggtaaggtcaaacggtggataatgccaatcattctcaacgtcgactacatccaaatgacccaagatgccaaaataggttggtgcttggctttcatccggcccatattcagcccagccaacacaatcaccgacttgcccagttctgaagcccattcgcgtcgcaatagacaacaccgtttccaatgcccgcttaggcccaatcccaaatggtgcttgatacgttttaacgccacgaacactcggtacccgcaaaacagccttcaaatcggccaaaaattctgcttcatattgttcaaataaggctttaaaatccgctcgaatcgctttcacaaaaatagcttctttctatgtttagacttcatcaaaattaatatcaatatctgtcgccatagccgcttgcgtttcctctgctaaatattggcgatccatcatcttaataaatggatagtaaattaatatccctaagactaattcgaataattgcaatactgatcctgtccaactccctgttgatagccacccagaaataatgggtggtgtcgtccaaggtagcataacaccgtttgtataaggtacccatcctaattggaagactaaccctgaaattaatgtatttaaaacagggacaataataaacggaatcgcaataattggatttaaaacaactggtaatccaaaaataattggttcattaattccgaaaatcccaggtacaattgctaattttcctaattctttaacacgtttagacttgcagacggttaacataacgattaagagtgataaggtactcccaccgccaccgtatgttgtaaaaatatcaataaattgttgcgtgtagatatgtggtaatggtacatggttttggaaagctgttaaattatcttgcgtcaatacgaagaaaattggtgaccaaacactatttgtaatagtggggccgttaataccaaagcaccatagtaacattgctataaaattatacagtaaggctgatggtaatgagttccctgcgccttttaacggtgcttgtaataacgtgtaaataaaattataagctgtttcgaagctagaaagactgaacccaattctaattaagaaaaagactaatacaacaagtccacttggtaataatgcatcaaaggattcactaactgcaggtggtacaccttctggcatcttaatacgccagttgcgcttaattgcaaaacggtaaatttcaacactgactaacgcgataaaaatccccaagaaaataccgttaggacctaaatacatcgtttgaatcgcaccaattgattttttcccaactgtcacaactgtaggtgtcaaaattaagaatgaaataatcgcaatggcactggtatgaatcgcttgtaaaccacgatttttaccataagcatacgaaatcccaaaacaagcgagtaatcccgtaaaactgaacaccgagttagaaacagcgctaaaccattctgtccagtccggtcctaatatattactccaaaattctgcccaaccaggaattggaaagttcccaatcaataagaaaatagacgtcacaataattaacggtgtgatgattaaaaagccatcccgtagtgatcttaaaacaacattattccctaacttaatcgcaataggcattaaaatctgctctagtttcttttgcattaaccttacctccttttaataacaatattgcgtaacaaattcactcgtctcttcatttgctactttcaaccgacaaagttctaacgcatgatcaattgaatctgataacccagtaccaccctttttaggcatctttacaattgtaagagctgcttcatactgctcaattaatgcctcgtttttttcaatcgccgtcaacgcaacgactggaattactgtgttctcttgaatattttcagccaattcacaagccattgttgagaaatctggatagtcatatgtgggccccgctataaccacatccgcttgcattttttcgcacatcttagcgactttccgcttaacctctatcttattttcttgatagtaatcagtcccacaatagaaagtcccgataatttctgaatccattttccgtaaagctttatcaattgtatctgcagcacccattgccaatttcttaccacctaaaggtgtatctcctttttctttaccacccagaccagcttggatctgatcaagcaagataattactttcatcatatagcctcctttttaatgtttacgactcaagatattgtggaacgtgtacttgtcagcccgataatgggaattatcataaaagattgggtagccatccatcgaataggcgaccgtatgcgccaaaaaggcgggctgtcctggtgttgtttctagtaattcgcttaaccccggttctaagataacagcttctaattcttgttgcgcataaccaattggcatctcttgttcaatcaaacggtagagagagccttgcgcttcgtgggccgtcaagttggggagtattctttgtttaaggtaaatctgttcgtgcgtcattggttcgttatcggccatccggatgcgttcaatctgccaaaccggttcttgctcgttgagttgtaatttagacgcaacgtagtctggatagacaattgcgcggcgcaaatctaacacccgagtgctcgcgtccaaatgtaattccttggcggcttcggtaaaacccactaaaccgctagccccactagaaattttgccttcggtcgctaaaacataggtcccacgattccgatcacggaccacaacctgttgtttttcgagtaagtcgattgccttgcggattgttaaccgtgtcgtcgcaaactgcgcggctaagtccgtttctgacggtaatttttgatggacaccatagattcccgcccggacatcttcgtttaacgcttctgcaatttcgacatatagatacttcgccattttctaaatactccttctaatcaattggggccttaattcgtttttcgtaagctattaaccaagcttcggaaattggttcaataatagtggtctgatccggccctggattagccatataaatttgcggtgtctgttcatcattcccggctgcaaaagtgaattcaacattggtggccacgccccattcaccttgattattcaatgcaatcagtgagaattcccccaccttgccgtagcgtttcttaagtttttcaacaaatggataaacggcttgatcacaagccgcttgcggcgataatcccgaacccatcaagcggacaatttcgtaagaaagacagcccttcatcaaatcttcgcctaaacccgttgcggtggcgccaccgatgtcgctatccacataaaagccactgccggataacgctgaatcgcctgtgcgccctggttttttcatgaacaaaccagaagtcgaagttcctgctgccataccagcatcttgatccaagctcaccatgccaaccgtatcgtgaccgtcatacggactaagatttttttcgttaatttcctgaacgcgtttggcccacaacttatgcgcgcgctctgttaacatgttgcgtgcttcaaaaccgttgaacatcgcatattgtgatgcgccagcacctaccagaaaactattaaaatgatcgttactcaattggcgtgcaaccgagatgggatttttaacatcgctaatccccgcaaccgccccaatcgcaaacgtattgccatccataaaggccgcatccatttcaactaaaccttgtgcattcggtaaaccaccgtagccaaccgatttaaaaaatggataatcttcgacttctttgatagcgatttcaattgcatccgtacttttgccgcccgcttcgagcgtcgtcatcgctttggataatccttcataagccattcgccatgtcccaatcattgcatacgtcataatcgttcatctccaaattgtaagcgttttaataattgtagtataaacaaaattgtatatacaatcaagcccttttccaaaataaaaaagcgttgcgacaaaagattacttttgcgacaacgcctttttcaatcatcaactatcgatgactgataacacctattttttgtttattttgtttttaaatcctcaattgagttcacgttagtcatgtacttcggcacagccaagccaactttggcgccttctaagttaggtcctaagtcttcaaacttgccttgataatccttgtagtacaaaccagatgtctttggtaaccaagcagcaacctgtgcatcggccgctttagttgcgactgacgcccacattggttggatttccattgcctgaattgttggttcataaccttgttgacggagtacttccgcaacaacgttggttgaagcaatttcagaatcccaagcgacataagttaacttaattttcgtaccatgaacttttttaacacccttggtccatttagcaacttgtttgggattagctttaatccaatctttagcagccttttctggatcgacgccatcattaacttgtaacatcacttttgacatttccgctggtgtccagtggaaccggtcaaggatggtataagcttctggcatatcttttttaaggccttttcgaacaatcgtatcgatatgttcagcctggccaaagacatttttaggatccttcaaaaacttgattggatatttagtaaacatccaatgtggttgccaaccagtaatcacgattggacgcttgtcagcaatcgctttgtccaaagtactggtcattgcagcggttgaactggtttgtaactgccagttttgaccttccaaatgatacgttgataaagccttttgcgttgaagccataataccagctccggcatcaatcccagtaatcgtgtagttgatttgtgggcctaacttttgcttagcatcataaggcttagtttgtgagctacaggcactaagcaacgttactaatccaattaaggtgaaaaaagctattaatttattcttcttaatcactaaatccctccttaatgttgtcgttgtctgtttagtgcttgtgtcaaacgatcaatgataatcgctaaaataacgattgccaagccggctgcaaaaccgcccccagcatcgttccgacctacggcgaagtaaacccgggttccaagacccattgcaccgatcattgaagcaataacgaccattgataaagctaacatcatactttggttaaccccggccattaaggttgatttggcgagtggtaattgcactttaatcaatttctgccattctgttgaaccgtaagaatctgcggcttcaattaattcggttggcacttggcgaatccctaggttagtcattcgaaccgttggtggcatggcaaaaatcactgacgcgaaaacgccgggcaccatcccaatgccgaaaaaggcaaccgctggaatcaagtaaacaaaggctggcatggtctgcatgaaatcaagaattggtttaaatattgcctgggcaatatcacttttagccatccaaatcccaagtggcacaccaatcactaatgagattaaactagacgtcaacacaagggttaacgtttgtgtcatatcccgccagaaatctaagttccagattaaaagaaggccggccacttcaaaaaggattaagccccacttcttcgtatcgcgattggcgaagtaagtgacacccgcgataatcacgataaataaccagatcggaattaaatcaaagacccattgaaagccattgataatcccaccgataaagtttgttaaaccattaaagaaacctgtaaattgtgttagccaatcgacaaaactgtccatccaactagcaagtggtaatttaggaattgtcattaaattaagcaaaatggttcacctcgtttcctgcaagtgcgcctaagacggcaccgcgaatgatgatcccacgtaattgttttttctcatttaagacggcaaatggaatcccggtttgtgaaatatcatctagaatatccgcaatcggtgtttcttcagtggttgtcggtacgtttgcattaacaacggactgaagatcccgactttccttacgaactaattctaaaacatcccgcgcatcgataatcccgaccaattcacgcttgttattcacaacataaacggttgaaacttcattttcacgcatacgtttcaaggccaaacgtgggccatctttttcgatattaaccgttgttggacgaatcataacgttgccggccgtataaaccttactacgatcgacattttcgataaatttctcaacatattcatcagctggacgcgttaaaatatcttccggcgttccagtttgaacaatttcgccatccttcataatcatgatgtgatcgccgattttgagggcttcgtttaaatcatgactaataaagataattgttttgtgcattgtttcttgtaaatcaagtaattgatcttgcatatctgaacggttcaatggatctaacgctgagaaagcttcatccattaataggatttctgggtcattggctaaagcacgtgctaaaccaacccgttgttgcatcccaccagataattgtgttggatattgttccccataaccatttaacccaacgagatctaacgcttcattagctttttgatcgcgcgtttgtttatcaatcccttgaatttccaatccataagaagtgttgtctaggattgtgcggtttgggaaaagtccgaaattctgaaagaccatgctcattttcttgcgccggacttcaagtaattctttcttatcaatctgcattaaatcctcgttatctatcaacacactaccttcagttggttcgatcaatcggttaatcatccgcaccaatgttgatttaccactaccagatagtcccataataacgaatatttcgccagattcgacttcaaagttagcccggtcgacaccgattgtcgcacctgtttcctttagaatctcagctttgctcttcccttgtttcaatagttctttggcccgcggcacccgcttaccaaatatcttcgttaaatctttgacttgtaatttgacagtcatagaatccccctttgatataaatttttctgaaaactatacctaaaaagtatactagtttattgaacaggttgcatattgttggttagctttctcatttttttatcataattcgcattaattaacgatttagcagacaatcattaaaatatcttatttcccaatccattgcaccctagaaaatttaaataacacttataaaacttattttcaaattgcaactattttgttcctattattaaaatgtaatgagaaatgcaattattttctctctgaatttaagtggcaatcaaaaaaacaggcccctttgggaggacctgttttggctaacctgttaagcgaccttcttttgataacggtgatagagcgcaatcgccataattgcaaagatgattggcccgatgaccatccagaaagcatccatatagctaccttctagcattggttgcacaatcgtgaaggcaatcccgaagactaagactaaatcgacaacgattgtcacagcttgcactgatgctttagtcttgaagaattcgtatggccgttccaaatctttgcgtgccttaaagtaagggaaggcagtcactaagaagagataaggtaatgatgttgaaacattcgacatcaaggttaatacattgtagaattcgctggcagctttaccaccaaatgagataacagcaattaataaacaaaccaaaacggcttgtgcccacattgccttttcaggcatcccgtgtttattgacttcagcaaagccttttggccataatgctttgggtgttcccagtacgaatgattttaatggtgaataaatgaggacggcaaaggccccaaggtaactgataaacatgattaacccggtaattcgagcaaataacgtaccgattccaacagcggctgtcgttgacataccaaatgcatgtccaaattgataacctaagttttgcatcaagacgtacgtgatgttccccatgttggctttatcgccacctaaaacttggtgccagttcgttgaaatcccccacatgaagattgcaatcgcgtagattaaggtaatgaaggctgtcgcaatcattaaccccttaggaaaagtcttttctggatgatccatactatccgtcacgccacccattgtttccatccccgcataagcgaagattgaaaagacaacaaatgacaacatcccgattggtgattgataagaagccattggactcttaacgaaagttgtcacaccatggattggttcggcaagcttaaagcctgtcttgaaccaaattgcaagactgattactaagaaagctgcgaataaaaaggccacagccatcccactgaaagaagcaaacttctgaatcttatcaatcccacggcttgataggaaggttaacgctaaaatccaaagcacgcctaaaacaccgacgacttgagtcccgtttaacccgataaaatgccaagttgttgtttggtctgatccttgtaagaaagttgaaaatggaatccacactttcgcagcggtcgataccatccaaacaatccatgaggctaaccagatgaacgttccgataaaggctgccttcttaccaattgacgcttcaagccatgaataaaggcccccacgcgcttctttcaatgatgaaccgtattcggcaaacatcaatgaggttggtaaaaagaaaaagatagctgctaggatataccagataatactggcatagcccattaaataaaaggcaatggtggtattcgcaaagccaaaaattgatccaaagatcatcaagattaagccattgacattaatcttctttgatttctccataatatacacaagtcctttttgttggtctaagttagaataaatatacaattctaccagtataatgtcaatcttatatgaataaagaatgctaagtaatcgtttttattcatatattcattatttttatacagcaacgcccttaaccactatttaaaaacaaaaaaagattgggacaaaaatgaatttatcccaatctctttttcaatactttcagttaaatgctgaccattctaatcgtcataatattcttattcatcgagatgtcttccacaatttctgaatattgcatctctcgtggaatttcgattcgataaacgttggtgtaaatcgtatcccgttcattttgagtcaccgagaaattgacatcccgaatctgaatatggtgttcctcaaaataagtttggataaattccttggtctctagtttgtgcttgtatttaatttcaattttcttcaacgtattgatatgaataattttctttaaaaagacaatcacaaaaatgacgaaaacggcactaataacggcaatttggtaatagcccatcccaattgctaagccaatgcccgcggttgcccatagtgaggctgccgttgtcagtccctgaatcttatgacgagttaccacaattgtaccggcacccaaaaacccaatcccactgaccacttgcgcaatcaaacgtgcctgatcagaacgaatcgtggtggcaatcgccaaatggtgtagcgcaaattgcacattttgagcagcaatttcctgttggatcatcgcaatgacacaggcccccaagcagaccagaatatgcgtccgaatcccagccggacgatttttatactcccgatcggagccaataatcccagcgattacggtcgctagggtcaaccgaatcataatatggactgttgttacttcaaacaaaatatcatccctccagaataataacttctttctagtctagcacacctactgaacagcaatcaaaaaagcgattagctgcctctgatatcggccaagctaatcgcttatttcattaggctgctaggcccactgtttgtaagattaaatagatattcaataatgttaagacaattgttacgaaccaagccgtatatttcacccaagggcggttaacgaatggtcccatgattttttcatcactagtaaacaatgtcaatggaatcattgaaactggcaatgcgatactcaagaagacttgtgagtaaatcaaaaggttttcaacttgggcttcattcccatggtaataaaccgtgaagatgataactggtaagattgataacccacgtgtaatgacccgacgtgcccacaatggaatcttcatacggacgaaaccttccatgacaatttgtcctgaaagcgtccctgtaatcgttgagttttgacctgatgccaataaggcaacagcaaaaagtaaactcaacattgggctagcaatactcccaacaatttctttgttttgtaaagcgttaaataaatcaacaaaacgacctaaatcactgttagtaccatagaacattgctgcaccaaggattaatagtaaacagttaacgacaaaagcgattgttaattggatgtttgaatcgattactgtaaacttgattgctttacgtttttcagcaacatcatcacgatcgtattgacgtgcttgcgcaattgaagaatgtaagtacaagttatgtggcataacagttgcaccaacaatccctaatgccaagaacaacatcttcttgtcagtcataattcttgggcttggtacaaatccacgcacaacatcacccatgttaggttgtgccaagattacttcgtataagaagacgaataagataacagccactaaggttgctacaatcgcttcaattttccggaagccaagtttcatcaataataataggagcaagacatcgaatgcggtgattaagacaccccataataatggaatattaaagattaattctaacgcaatggcggaaccaataatttctgcaatatcagtcgccataatggctaattctgtgacaatccacaggaaaatccccatctttttaccggttttggcacgcgtcatctgcgctaaatccatcccggtaacaattcctaaacgtgccgccattgcttgtaatagcatggcaattaagttcgatactaaaataacactgatcaaggtgtaagcaaattgtgccccaccggcaattgatgtaatccagttacctggatccatgtaaccaaccgcaactaacgcaccgggtcccatgaaagccatcaaggttttccagaaaccagcgttcttagggatcgcaacggtgttgttaatttcttctagactactaccatcagcataatgaataaatttctcatgcttttgtgaatcttctcgctgtttcttatccatataagtacctctttctcttcgattgagttattcaactattaggatccgatgactttgattttaggatgccctaactttggtcgtccccactgctcaaataatccttcattattctatcacatccgaattgacttgtccctatccaagtttaaaaaaaacgccaatttagcggtctttttttatgaagcgttttccaaaactcactttaacacgaaaaatgcccagatgtctaagaacacatctgggcattactaataggaggaaaatcgtttaggttgatagctaaccggcaactctcgttaacgaaattcggcatatttgctgtgaattcacgataatttgttgcattaattcatggacgatgaaacgatcattcggcatataattcaaaattaagacgtgcacagtctcttcgcacttctccaagaccttccctaaataaggttccgtcatcatttcattggcttggcatcgtaccaagtcacctacattaatcgtcatctatcatccacctcgttagcttatttgactacaattacattataccgtaaccgcttccttttatcaaatatcatcttatgctaatgattagttttgttaggaaactaaattagcttaacgattaatcttcttgtaattttcatcgaagtaacgaccttcttgaatatcttcaatcatcccttcatatggtgcttggctaataacatcttcattgttttgaccagcatcacccatgtaagtaattgtagcgaattcaggtaccaataacttaggatatgtttcgtatttttcacgtgattcttccatcaatgcgatatggtcgttttgataagtgaccgtaatttctggatgttcttcaacccatttagggaagaagattgtaccgtgtaacttgttttcgttaggcatgaagtccaaagcaacatctgtcccagttggttcagtccaagtaatcttgaagacaccgtccgttagtttaacaatattggcttcttgatcgcgaacccaacgccctgcaaccatcccaccatgaattcggtagtcaacggtatggtcatttttagcataccattcgtacttccaaccattatcatatgtgtaaataaagtgtgtgcctaaaaagtcttctaattctttaaattgttttgtcattaaaattacctccaagttattatgtaattaattacatgtttttattacaacgtaagtgtacggctatttttaaaatttgtcaacaaaaaaagcattgggttaaaagttacctttaccccaacgcctcattttatttttaagtttattttgtaaaatcaatcaccattcgacctgaaatcttaccttcagccatttcagtcataatatcattgatatctgccaatggtctggtttgaacaattggtgtcactgcaccttctgcagcaaattcaaatgcttccgttaaatcagtccgtgtcccaaccagtgagccgatgacttcaatcccatctaataccaatcttggaattgaaagatccatcgtttcgacaggtagtccaacagccactaccttgccggttgcacgaacagcgtctacagcttggttgaaagctactttagaaacggccgtaatcacagttgcgtgggcgccatcgccagttacttctttaacccgggctaccacatcttcttgcttgccattaatgataacatcagcacctaattccttagcaattgctaacttgtcatcattaatatccactgcaatcactttagcattgaagacattcttggcatattgaagcgctaagttgcctaagccccccatcccaaaaataaccaaccattgacctggtttgatgtctgaaaccttaattgctttgtaagttgtgacaccagcacaagtaatactgctggccgcaattggatccaaatcttcagggactttcactgcgtaatcagcggtgacgatacattcttcagccatcccaccatcaaccgtatagcctgcattttgcgcttggcgacagaatgtttcttgaccattcacacaataatcacaatgcccacagccttggaagaaccaagcaacactgacccgatcgccgacttttaacgacgttaccgctgagccaatttcactaacaattccaacaccctcatgccctaagacacggccaggtacttcgccaaaatcaccatttttaacatgcaagtcggtgtgacaaacaccgcagtattccatcttaacgagcgcttcattggctttaattggacgtaacttcttatcaataatatcaactgtatgttctttgtttgcgaccgctgcttccataatggcacctctttaaccagtttttgaaatcgtttccataactaattatagcgcattatgatttttttcacaatcttttcttatgcgcttagcagcattatttagttgctgccaattgtttcttgatagctgacttcaaaataaacggtgctagaatcgttgtcaaaataatgacgaagataatcgctgaataatacatttcactcaataacttcgctgtataaccgatttgcgcaataatcaacgccatctctccccgcgaaatcatcgctgccccaattgtgtaggcacccgcttgtgggacacccatcattttggcaccccagccactgcctaataattttgccaacacggctaaaacggttagtacaataatgaagactaaatgccgatttaaatcggcaaacgtcatcgataacccaatgctaacgaaaaagacaggaatgaagactgtatagcccagtggttcaatatgacggctaatttcagattgatatggtgtttgcgaaatcgcaattcctgcaaaaaaggcacctacaactgtactcaaatcaacggcttctgctagccaaacaaaaacaaaacaaatcactaacgacataatcgcatttgcataaggcaccaataaccgctgactcaagcgcatcacacccggcactaaccacttaacactgaagtaaaccactacgaaaaaggcaatttgtaaggcaaaggttagcccaagtcccatctgattaggcgcagcggtggctaattgcgcaccgaagagacttgttaagacgcttagaatgattaccgccaataaatcatcaacgactgcagcccctaaaataatcgtaccttcgcgactctcaaggacttttaattctcgcaaaacttcgaccgaaatcgatactgaagtcgcagcgaaaataacaccaataaatagactctccaattgattgatgccaaacgctaaactcatcgcgtaaattgatcccacaggcacaatcacacccaaaattgcgacaactacactgggtttgaagtacttcttcaaaagcgttaagttactctcgagaccggctgtaaacatcaataagacgacaccaatctctgaaaaggtatgaataaagctattctcatgtaatacacctaacaatgccggacccagaataatcccgacgagcagctggccaatcaccgccggcataccgattcgtttactgagatgaccggctaataaagtactgattaagataattgctaatgttgacattttctaatttcctccataaaaaagcgcactaaaattcccttctaccaccctaaagaaggaaatcttgaatgcgcaatgcttcaaccgaattttttcacttatacaattatgctaccatatcgaatgcacaattacaaaagtattgcttagctattgctaataatttttattagattgacacagcatcagtttcttgataatttaaatatagagactattcaggaggtgaacgtttttgaaagataaccccgacgctgcggcgtgttattgcttaaaaagcaatctttattggcgaaaggaataatggcgttaattttaactattatgaatttcaatataaaggagatcaacaatgacaacccagattaacccttacaatcaatcgattgaggatttacagaaagattacccgggaaatgattttgaacaaggcctttcccaagtcgaggcacaaaaacgtttagccacaaacggccctaacaaactagaaagtaaaaaaacacctaaatggcaactcttcattcgccaatttaataacctgattatctacatcttaattgcagctgcgctactcacaactctgatgggtcactattctgatgccatcattattggtttagtggtcatcatcaatgcgattatcggttactaccaagaagccaacgcctcagatgcacttgaacgcattaaggatttattggcgaccgaagcaaccgtttatcgcgatggccaacgaatcgatattcccaccgaagatttagtggttggtgatgtcgtcttcttagaagccggcgatagcatccctgccgatttaagaattgtcgataccgataacttgcgcctcgaagaatcagcactgaccggtgaggctgattcggtcgataaacaagcagcagcgctcacaccaacaactgtcccattagcggaccaaattaacatggcgtttgcctcaacctccgttacaaacgggagtggcttgggcgtggttgtcgcgaccgctgaacaaactgaaattggtcaaatttcaaaagcagttacgcatacacaaagtcgccccacaccgctgacccgcgagattaataagttaggggccggtgtttcttacgtgattattgccgctgccatcttgttattcatcttaggtttcatcagcggcctctactcattaccggtacttgccatcgctatcgtcacgatggttgttggttcaattccggaaggactccctgcaacaacctctgttattttagctatgggtgttagtgacatggccaaaaataaacacgcgatcgttaaaaccttacccgctgttgaaacattaggttccgttgatgtgattgcaactgataaaactgggactttaacgaaaaatgaaatgacggttaaagatatcattaccgccgatcaaatctaccatgtttctggtaacggttatgcacctgaggggcaaattcaacaagctgatcaaccagctgttatcgatgacactctcgccctattcttagaagccggttttgaagccaatgacaccacccttttcaaatcagatgagggttgggcaattaacggtgaaccaaccgatggtgcctttttaacggtctaccacaaaggtttctcgattgatcaagtaccgcaaaataccgaaattgacatgttgccgtttgattctgattaccgctatatcgccaaattagttcaaacaacaactggtcaacgccgcctctacattaagggctcaccagataaattattcccgatggcgcaacaaaaagacgctgccttcccactagatacttggaatcaacacgttcaacgactctccgaacaaggtaaacgggtcgtggctgtcggttacctcgacgtaccagcatcaacaacgacgattacgcatgaaggtcttaacaaagggattaccttgctcggcttagccggcattatcgatccgcctcgtgacgaagtgattcaagcactggctgaaatgaatgcggccggtgtcgatgtcaaaatgattacgggtgatcatcccttgaccgccaaagcaattggtgaaaagttaggtttggccccagtcatcaaaaccattaccggccctgaatgggatcaattatcccctgaggataaagaaattgccgcggttgaacatcaggttttcgctcgaaccactcctagcaacaaactcgaaatcgtcgaagcgctccaaaaacaacacaaagtgacggcaatgaccggtgacggtgtcaatgacgcgcctgctttaaaacgtgctgatattggggttgcaatggggattaaagggaccgatgttgctaaggattctgcggatatgattttaaccaacgataactttgccaccatgtccgtcgcaattcaagaaggacggcgtatttacgataatatcaaaaagagtattctcttcttattaccaacgtcatttgctgaaggtttaattatcgccttcacgattttaatgcaacaatcaatgccgctccaagctgctcagttactctggattaacatggtttcggcaattacgattcaatttgccttcatcttcgaacctgctgaagatggcattatggcgcgggccccacgcaaaacaggtcaaaccttaatgaacaaacacgacatcttccagatggcctatgtgtcggtcttaatggcgttgattgccttgtgggcctatgactggttactcggccgaggtgttgatcaagtgactgcaagtacgatgatggtcaatatcatcgtcatcagcaaaatcttctacctcttcaacatccgaacaacaaaattagccttttcaaaagctttcttctcaaatccaaaagccttcgggattatcgctggcatgattgttctccaattgattttgacttacgtaccgtttatgcaaaaactattctatacagaaccactaacactattagaatgggcggtatcaattggcgctggtttcttaatcctgattattacggaatgcgataagattatcagacttaaactaaaacgataagcgccaaaaagggactgtgcaaatttacttttgtacagtccctttttatacatgttctataatcgactaatcacttcgtcgacattcttgatttcaactgacattgttccatccggatgattgataaattcaaataggtccggattttgatagacgtcaattggaacgattaattcaattccatttgataattttaatttttgtttaccgtatttcttctcggcaatttcacgcacggcaggtgaaatgggcgcatccgctggcgccttttcaaccatcgctgctttaaattccgtttgtgctgagacattatccttgaagaccttggccgcaacatcctgcgtattgatttcaccctttgcctcaatcgtttcgtaaattgcctctttcacattggcgacaatatcatgcttagcgacttcaaatttcgcaccaattttttcggcggctttcttcacaacccgcacattttcttccaaggatggttgcggttcactctcaatgacttcagttgacaggtatggccgtttatctccagagaaggtatattgtttttcaattagttcaaaccctaaggtctgcagattgatggcaaacccttcgtctgctttttgcgtcttattagataaaattgattggtgaataattaactgattggttagcggtccctcttcagcattcacatagtgggtataagcttcatgataattaaccttcaaaaaagcgacataagcctgcgtatcctgttcataaagggcgataaaaacatcggcactgggcgcgtcatcactcttttggtaagcttgataccacttatccacaagttgttgactgacacctgtaaaatctgaggcgatattcaatagttggttagcaacctcagaaccctgacgaatcacgcctgttttactctgcgctgacgataattttttaattttattggttaaataatcccgcgtattgccgttggttaaatccagcggttgttgggaataaattggtgcgcctaattcgcgatcaaccacttgtaatatagcctgttttaaataaatatccacaatatatccccttcatttcacacgatttgctttcattagcgtatcagcatcgttcccatttggcaacatcaaaaaaagactaggataacgaccctagtctcattttgatattgatacctgtctaattacgagtgcccactcataattacaataattaatcgtctccgatactcttgcttcatactggttcatctaattgaacagtcactaaggcattactccccccgaaataacgcttagtggctatcaatcccctgatctagatgcaccctagctattgtgcaataaccttcaatagtttataaccgatattattataccctaaaacgactatcatgactatgcccgctaatgcccattttcaaacaaaaaagaacgttcgcgataaaatgatatttatcacaacgttctcttaatcatacttatttttgaaaggctgctaaacttaacgccccaattgcttggcgttcagctgccggattttggacttgatttgttaagacaacaatcgcaaatggatcattatctttaaagacgatccccacatcattttcaacatcggctaactcgccggtcttgttagcaacgaccgtattagctggcaattgacttgggattttagtccgcgtttgttggcccttcataatcgtcaacatcttactgtaaggtgcctgatcccgattttgatagagttggttcaagaattgtaagacgtctttcacggacgtatagttatccaacccttgattacgggctgcatcatctaacattttccgttctaacttagtctgtgtataaccttgttgttggatatactgattgatttcggtcattcccgcaaaatcaattaacaagttggtcgcgttattatcactctgttgaatcatcaattggatccattcatcgactgaatggttatcaatatagtgaccgccagaaatcttaccttgtttaatctggtcatagagataatccatgatgaataacttaatcacactagctgaaataaaaggttggtcctgattactaccgactgagcgcttactgttgtaatagtagatcccataaccgaccttttgcgcattagcagttagattttgtgtatcaaaggtcaacgctttttcagttggttgcttcttaggtttttcagtcgctttggctgtttgtttaaccgccttttgtgaccggttagcggcggcctttttggcttttgactgggcctttttgcgagcaaccaatgattgttgtttagcgcgactttgagcagcttgatcttgacgatttttagcgaccgcgataccaataccagccgcaataatcacaataatgccgatcacaactactaatatgttccgacccaagcgttgattcttttgcctactaaacttttctctacgcggttccatctgtcatcctcactttcagtttccgattatgtcgctgaatccatttctcaatgttgtattctctgtttccttaaacgcaatcgaacttgatgtgctcccttgaccttcttgtgcaatcaagaccactggtcggccatcatgaatggtaaatagataaaaatgatcttcttcaccaccactgttggcatccgagtaagctgcgacaactttataatctgccttggccgaaacaccatcttcagaccatttaacagttactgggctcccaccaacttcggtttgaatggcaccagataataagtcgccaggtaaatcaacaccatacagcgagacattatgatggtcgctatattcttggtagtcctgatccatttcagtgccccagtcagccataaagctctgcagactatccttcttagactcggtccataacggatttgcaacggattccgaactacttgatgatacttctgaatcactgatactttcactgtcacttgcttgtgtgctttgttgttttgaagaagcacttgttgccattttagtatttgctgccggcttttgtaaataaaagcctgcccccacagcaattgctaacacaactaggcccccaatgaggattggtacccactttttagattttgattgttgtttaactgcctgacgactaaccaccggttcatggggcgtactagctgagttgttaggtgtcaccgtatcttccttaggttgttgcgttgctggttgttctgtagcgtcttctagtggcttgccacaattaatacagaatcgtgaatctgcttcatttttagtcccacaatattggcaaaacatgttgttccccccgagtaatatagtttcatccttataataccatttattttaaccccttaataggtcactaaccttatacagatttaaaataacgggcaccttcaatggtatgaaaataaatcaccgtttcaaccatttcgttattcacactacttaaaaatggccactcaccttgcagcacacgtaaagccgtttgtggtcgcgataattctcgttggaagttctcctgaaccgcgactggcgtatctttgaaaattttggcatcggataaataacgcgcataagcgctaaaaaggcgcttggcttctggtgttttaatggcaccgtaaacttcccgtagcgcttggagtccgtaagtcaccaaactcgccaaaataatcgtgccattcctgttctcaactcgtttgaggtaatgaattagattgccccagaattgactataagcctgcatctcatcatctttgagatactctcgaatatccgccacaaacggataggtccagttacgggcgttcaaataattggccgttccaatatagaacgtatacggaaagccaaaataaatccgcgttaaatccttgataaaccattcattattaatttcggcatagtgtaagcccgttttaacctgcaggagttgctcaattttcttatcttgcgtattttgcttagttaattcaaacaatacctgccaagtcgcgtcatcacataaatccggtcgataatgcttaatttgcttcaattggaccggtgccgcattcaaggtgtaacccgcattaaacggttgatctaataactgcaaggtttggacaaaatgaccgcccagtgaatggccgaggccataaatacgcgtcgttgcttcaatctttttaacatgtcgaaccacgtaacgggtgaaacgccgtgctagctgtagttgctcgtcgttatcggtgtgaccaatcaacatcgcgtcgatattatatttccagtcctgataactctcgcggacataattatccaaacgctgacgaaacgatttgattcgcggatcatccatcgtcccctctgttcctttatacgaaataaaggtcatactttgttgtttgaaggtgaaataatacgcaacggctgagaatcctgttttctcggcattcggtaaaatagttcgcgcatcgtatatcaacacattatccacagattcttgggtgtagcgataaacaagtaagcgaatatggcgctgtaactcaaccggcgtgaacataatatccatatagttgagcatcatcatcgccatcttgaaatcccggcttaaaaaaggcaccgccactggcgcaacatttggccggtagtgcgcaataaacgcagttttttcggtttcgtataaataagccagtacttggtcacataagacgatactggtttcgatcttttcaccttgtaagttcaggattaactgacgcaggcgattaattttgcgctgccgattgtactctggtgccgcaaccaatgctgcttggctttgctgattcaattcgttcaactgaccgattttctggcgtaaataaatatcgccactcgtcaacttcagcaattgcttcaataacttttttttttgatttcgcagctgttggtacctaaattcaaaacgattattttgtcgcaacagttcttgtgattgctcgcgatccaaggtaagtggcaccttcaaatgcgctttgaacaatagcttccctaaatcatctaaaacagtctctaggcgggttaaataaattatcatttgttcagtttccattatcattacctcgatttcaccattatttcccaggcaattgcccaccaataaaacatattatttactattatagctgatttgaaaacaggacgcccgccacagccctttacaataaaaaagagttgcggcaaaaatgatttttgccgcaactctttttactttttaaaacgaaatttcaaattcaaaatggcgatcctgcgtcgcatctatttgataggccgcttctacgtcgctaccccaactatcgataccgcccacgccacgaacggcccctaagagatttaagactgttcggtgtggtgcgggtagttctgaatgatgggtcgcattttccaattcttcagcggtatatggcaaacatgaaaaggcaaatggttgatcgaccatcttaaacttcaagccggtttcgactggttcgcgcaaacgattatccagaaccgcttgccgataaatcgtcacccaatcggttgccatatgcacaccacaatcttgtggcactagataaggcgtcacaggtagcccggtgacttcgtattcgccagcaatcccaccagccattcgatctggataagtctcccctgacaacccttgataaataaagcgcgtcgctggggtcggcatgacaaagcgtaagccaaagactggcaatgatggtaatccagcttgcccatgataagtcaccgctacacggattttaccactggcttgaatcgtataactgacttctaccgtcgtctgcggcgtcgtaattgtttgataggtatacgtaaccgtcacttcttgggccgtttcccgaccactatagcggttgttctcgggcgcaattggcagcggaatcgtttgcccgtcaatcgccactgtaatcgactgacaagcaatgaactgatcagcagctagccacattcccgatttcaatgggaattggttgccgcgatcattatcggtagttgcccgccaaaaagtcggttttggtgagcgatatagccattctttaccttgaatccgcaatgattctggcccacccgtttggtacgaaaagaggtagtgaaagtcagggcctttaagtcctaaagtcacatctccgaagatcactgctaagcgtttatttgtgttcgccataatagtatctaacctcctgcattgctggtttttcatcgcgggtagcaaagactaacccatcccccgaaaattcatagtctgatgggcggtcatcaaaatcgccaccgtagcgtaattcacgttgaccagtcactggatctgtcaccaagagtgcttgatcaatgaaatcccagataaagccgccttggtacatgtcatattgtgacaataagtcgatatacgattgcataccacccagcgaattccccatatcatgcatatattcgcagagaataaatggtttttgtggggcgttatctaaataagccttaatctcagccggtgtcgcatacatccgactttcaacatccgaaatcgtcgccttatactcgggcgcccggaagaccccttcataatgcactaagcgcgttggatcttgttgcttgtaataggcgttcatcttctcaagaacactaccagcgtaagattcattccctaatgaccaaaagagaattgagacgtgatttttaaacgtttcaaaattggttcgtgctcgatcgagcgtcgccgcttcccattcatcatatgaacctgggacgttccaagaaggttcgaccgcccccattttttgccaagaaccatgcgattccaaattggtttcagccatcatatagatgccagcttgatcgcaaccattataaaaggataaccgatctggataatgcgatgttcggacggcattgatatggttgcgctgcatgcaggcaatatcccacgcttcatcttcggccgtaattgtccgaccagtttcagggtgccattcatgccgattaacgccgttaatgactaaccgttttccgttgagcaacatcactttatctttaatctcaattttacggaagccaaatggttgctgactaatttcaatcgtttccccagcttgatccacaacttctagctctaatgtgtataagttgggagtttggttggaccatgcttgaaccaattcgggcatcttataaaggccgtttacctgagcggcacttgttaaatcggccgttaagatgatttgatgttggtccctaatgcgtagatggactcggttttcatctcctgaaaattgaaggcgaagtttcacctgtcccgtttgttgtaccacgtcatattcgggaattacccataaatcttccaaatgcgtgcggggtttagctaataacttaacatcccggaaaatcccgaagaagcggaagaaatcttgatcttcgatgaaagccgcactactgcgcttatgcacttcaaccgccaagcaattatcagtttctttaagataaggggttaagtcaaattcagacggtgtaaaactatcttcagcatagccgataaattgaccattgagccaaacatacatcgcttgttcgaccccttcaaagcgaatgatgacccgttgatttctcaaagctggcgttaaatcaaaatgatgcaggtatgaaccgacgggattataatcggcttcgctaaacatgccgagatgttgcttgtcatcggacgttgaaaaagcgggacgccgataataatgaccttcccacggatacattgtgttgatgtagtgcaattgctcataacccgccaattcgatatgttggggtactgtgattggttcaaaatcttgcgcatcaaatgctaattcataaaaagatttaggacgactcgccgcattaacactgtagtgaaattgccacgtgccattcaaagattgttcaaacgaactctgttgttgggccatttcggccagtgtcgcatagtaacggtgatcactgtgggcaggcaattggcccactctgaagacggccggtgtatctaaccattgaatattaggttgcataaacttaacctccaagtttaaattaaaacggtttcatttttgagtatagaagtttgccgctgggatgtcaaaaagaaccctacacaattagtgtcagggttctttttactatcagatttaattttttatcgttatcatatttactttccccagtacccttaaagcatttaatttaaagttagaatcttcttgaagagctttttcaacaacatcaatcattctctgatctaaaatatttatttttttatcctcatatgcttcattatatgttttttcaaaaatagttatataaaagcagaatatttcaaaaggaaattcatctaataaatcttttagcttttcgacattgggagccaatacattgatttctttcatcttaatcatcctccttttctatatcatcacatactcatccctactaaatgaatttaaatgcttaatatagaaaagttaaaaaaataggtttttatactaatgtaaacccctgtttcttcaaaaagtccccgacttctggacggcgtggtgcactgaaaaagtctaaattcttacttgtccagtcagcctgttgttgatttgatccccgattggcgtaataatctgcgatttgttgattgtattgttttaaatccgcaaattgcgcccgtggatattgattctgcgctacttgattgatttgtggcagtcttggtttaacctgatttttcgtctttggaatgccgacggttaacccaaagaggggcactgtatattctggcaacccaagtaactcagccacccgcgcgatatcattgcgaatcccgccgatataacaaatcccgagccctaatgattccgcagccaccgccatatcttcagcagcaatcgttgtatcaacactcgcgactagcaaggcctccatattttggatgccggccaaagattgaccctgggctttcaacatgctagcttgacgatacaaatccgcaacgaaaacgtaaaatgtaccggtctgattgacgtagctagcactattagaaatcgtcgcaatctcggtgcgcaacgctaagtccgtcacttcaatgattgaaaaagcttggacgaagttagatgacgaaccactctgggccgccgcaattaattgctgttttacctcagcgctcaagggtgtcgcttcaaaattccgaacagaaacatggtgttgcatttgtgcgattaaatcagacattggtaaactcctatcaccttggaataaactataatatgcttattttaagctaatcccaaccgctgtcaatcgataacccttctacaatacgacctgtgagcccttcttaaaactccaaacacctgcaattaatgctaatatcgctgttgcgactacatttacccaatctgcccatgcacctatttccaatttaataacccccaatatcgatttaaactaatgtggttttattataaaaaaggctggcgacatatactgtcgtcttgcagattaattttaaattagggcaaaaaaatagtaatcgacaagtcgattaccagtgaatttctgtaaaaatctttgggcctttacgcatctttgtccgatcattcttagcgacgtcagtttgttttgacttaccgccacccttcttttgatcgattaaggcttgcattttttctttttgcttttgatccattttcatactcccaactattctgttcctatcagcttaacataatttgcaccactacggcacccattatttttgaattgcgggaattaataagtcagtgactgcttggactgagaacggattttggcccgttactaattggccatcttggacagcgaatgacttatacgcccgctttttagtgaattcggcgccattttgagcggccacttcttcatttaaaaatggtacgacgttcttcttacctgccaacacttcttcggctgttgtaaaaccggtcacttttttaccggcaatcacaaactgaccttttgtatcttttaattgcaagagtcctgcaataccgtgacagactgaagacaggtagccaccttgttgataaattgcccgcgcaatcgcttggatttcggcattatctgggaagtcccacatcacaccgtggccccctgtatagtaaatcgctgcataatcagccggattaacgtcgctaggcttcaatgtggcaactaagccgcgttgaacgtaatctggttgttcataaatctccaaaatcgcttcatcggtatacttcatcccccgtggatcaagcggcacaaaaccacctttaggactgataaagtcatagtcgatgcccgccttttgcatttctgcgacaaattctgccgactcacccaaccataaacccgtgggatcagttgtgccttgataccgcgtgatgttggtatgcacgattaatacttttaccattttaaaaagcctcccgaaactagtgatatgggtttattaaatcattaacggtgatgactgtcaattgaagcacgttactttctttgtaacaacccaaacaacgttttgaactgatttttaaaggacagcatgtcgttaaaaatatcctcgccatcgttgagcattttaaccgtcaaccaacccagcgcttcggtgatcgacatcgcaaccgttgcgttaaccgctgccccagtgactgtcccgacaactggtacaagcttcaaaatattcccgacagcactgcgacctaacccaactaaaactaattccttcgacaaacttttaccgagactcgccgaccaagattggccgaacaatttgtgcaaacgggccatcattgtcaattggacaggtactaataagaaagcatctgaaaatggaattggtgaacagccaataatcgccgctgttaacgaggctgcatgaataatattatgggcttgttgccgtttttgatcgtcaacacccactaagaagtcggcaaagacgctatcaaactgcgtccggctcttggccatcgtcttctccgccaatgctttagactggttgaaggacttggcaataatcgccgctgattgtcgtggtaacttctgcaacacttccgtaaagaatgaatcgaactctggattatcatcctgattcacttgccgcttatcaaataactttttcatcacgccacgctccttatctcattaactgacactgctactttaagctgattatataatatcgaaccgtacttcgtctatcgagcggaaggctgactttttgagcaattaaaaaaacaccccacaactgcccgttatgaggtgttttcttgaataatagcgacttacttcttatttaaatcattcaaggtttcattggctttttcaatcaacgagacaactctcaaaatactttcagtttgctcgtccgttaaaccacccattttaaaaggtaaatcatcagaaatattcaataagtagtccgctgacgtatcaagaatactacaaatactgaccagcgtttctaaggatgggtatgatagcccttgctcataggcagaaacggttcccttactgacccccagtcgttttgaaagttctagttgagtcaaccgctttgctttacggaccgccttcaacctctcaccaaaaaaattaattgtcataaaattaaaccctccgtttagcgtagcaaaacgatatacgagtattatatgtattaagtgcatgctacgttgacacttttgaggttaattgatactattaacagcataaagtgactgttatgctagtaatacagctagcttatcgtcaaccagcttaacagactttaaaatatcgtaaaattcttgggaggaatgtatgattataaagacaaacgatccgattcactcactagcatgtttccatgaaatagatgacaaagaatatgttataacgaggtctatctcttaattgaacacaattcaacacgatactgtcaaacatattgccggtatcagagaacatgcattaaaaataatcaccatgttattatctaactcgggggagtattagaaatatgcagaagcatttaaccgtcattttgagtgtcatagccatattaacgttagccgcctgtgggcaagcacaaataaaagccccacaaactagtcacaataagaacgctaaggttgcttcaactagtcatccaaaatcggcctcacacagcacaacgtcgcgtgtcgccaaaagtgattcaacaacatcacaaacaccggcaaagcaaactggcatgaatctcactcagatccaagcgggcgattacagtaatatcgccggtcaatggcagttaagtagtcgccaagctaaaggtcgcgaaatgacaatcgataatgccaaacctttagcgattaccaacaatcaactcacatcagacagtataacgctcagcaaagctggcttaaaagacaatgcaggtttgcatccagtcaattttaaaacgactaatggccacctagccgccctattagcggattcagttgcattaattggtctgtcaccttctatccggttggtactagcaccgaatacggcctcgaagccgtcaataccaccaattcgaaaaacgtgattgtcatctggaccagcaatatgtcattgactgacgtctatgtgcaaagttaagcgatggtcatcaaaaaaagaccgttcaagtttaaaaacttgtgcgataatccctttatggttgtcagatgaaatacaataattcatctgacgactatggagggatttttgtatgcccagatctaaacatacggtactcgagaaattaacaatcttagatgaactgacccaatcaaaaattggactgggtccggtggccaatcgccatggcattgatcgtaagacgctagagcgttggcgagatcgatactcccgtgatggaattaatggtctaaaggaggctaagaaaaacaaacactattcgaaggaactcaagctcaaagtagtccacgcatatcttataggcgaaggcacctttgatgaacttgcaaataagtttggacttcgtggatcgcagcaagtcgtagactgggtaaacaagtataatgggaataaacctttgacggcgtcgccgtccagaaagcaggttcccactatgagccgtaaaacaaccttggaagaacgcattgaaattgtcgagtatgtcaccaagctgaatcattcatacacagaggccgctgaacgcttccaagtctcttatcaacaagcacgttcatgggtgatcaaggccaatcacggcggctatgaggcgctcgtggacaaccgtggccatcacaaagaacaagctgagctgactgaactcgataaagccaatcttgaaatcaggcagctcaaagcacagctcgcagacaaagagcttgtggaggcattcgcaaaaaaattgctggaaatccagcgcagggggtgagtaaacaacatcgactgtcttacttcgcaattaatgaggtcagtcaaggcaagcgtggtgcaatatctacgctgttggccgttgtcggtgtaagccggcaggcttactacaaagggttaaatcgagaagaaacagcttgggaagcccgtaatcgtcagctcaaggaacggacacaatactggtttgattttcatcatcaaggtatcggtgctgggaaccttttattgaatcttcaacatgatgacctaattgacttccccgttactttcaggatggtacgtcgtgtgatgcgggagctcagcttgacatgtcaaattcgggtcaagaagcacagtcgacataaggagaacgaacagcacattcaagacaatgtgctcaatcagaacttcgacgtcgacagtcctaatcaggtctggttgtccgattcaacggaactgacttacggcgtaaataataagtataaggtgcgcttgagtggcgtccttgatctctacggccgacgtttgttgtcctacaatttgagcactactgaaacgtcagcagcagaaatcgaggttttccaacgagcctttgaggcttctggcgacgtccacccattggttcacactgatcgaggatcagcctacacctctggtgccttcaacaactttcttggtcgttacaacgtcacacgtagcatgtctcgaccaggaacaccatacgacaacgcaccgatggagcgctggtggaacgaattcaagttacggtggatggctcgccatccactagcaaagacttgcgaagagcttgtaagactggttgaggaaggaatcgaatatttcaatcaccacaaccgctcagcacaaagaaacggcctcaccccagatgaatactggagtgaagccgcatagagacagattcaactttatattatttcatttgtcaacttgacagggcctagtgcattgaacggtcttttttatggtgctaattaactttgtagtaaacagctgctacatcaacaagagtagcactatcttgcgtgccaaccgaaatgattttatcttggttaacgtcgccatcggttaaatcacccatcgtgcctttaggtaagaatgaaatcgttaggactgcacttggaattgtactccctaaagtaaagacgccatctttttcccctgattttaattgttgttcgtaggctttagtcgttgtgccacctaaatatggcacatcttgcggtctaccatcttggccatctaatcccggaatatcaatttcctgtccgattaccgttgcggttcctttatggtctaagatatccgaaaattgcatcgtttgatccctaatgacaatctttcgaccctcaccattttgccaagtgccattcagactcgcatagttaccggttttaacctcttcgtaattcatggcttgggcttgcttaggcaaagctttggttgccgtttctgatgatgttgatgatactgtttcctgaacagcttcttctttaacatattccttatttgctttaatcgtcgttttgatttgttgcgtcatttttttcaacccttgtgtcgtatacacggttgaccactgctgattaacgtcagccaataaggcttgtaggcggtcgtttttgctcgtaacagtctcagtactaacagccttggatagtgtattagcctttaatacctgctggttttgatttttaaagacgccttggcccatcgtaatcgcgacatgataggcctgattaaccttgctactatggttatctttttgatggtagcggtcagctgccgtcaccatttttttcaggactgttaatttctgtgcatccccttgcgcctcattaaacgtcttaacgtccttttgaatattatctaattgcgtcgtgatttgcacttctttttgctgatcttggtaccgcgtataaccccaaacgccaccaatgaccgcgatgattaaaatcacgacaatccatactttacgcttcacaactattcccctcataattgtctatgcaattgattatccaccaattaggaaccgatttcaacgctgatttattttaataagtacatcgacttcaaaatagaagcattatctagcatacttttactagcattatcaaaactaataaaagaaaacctctgatattgggctaaacgccaataccagaggttttctttattgtagcaaatataataatatattgatgtaccaaccaacttacttttcaccagagaataaagtaacaatatttgagttatcaaaatattctcttatcggttcctctccatacctctctagaaaggtattctcaagtccaaacagtgaatcaagaaatgaacgatcgatgtaatacttatttaaaatatccgttagcgaccaaagatgattcctaaaaataatatctaataatgaacgtatctttcccggtctaataatcgcgatatcttcatctaaaggttcattttttctatatccttttcgatttaacgttgcataaaaataacgattctcttcaaaggtaagcaagcctaatttgtaagcgtgatattctagcgcacctattgaaaccatatatttcatttttaaatctaaatatgagtccggatttgactttttttgaattattgaaaaatcttttaagaattcatccttaggcaaaagaaaacacgaggcaaaaatatttgcttctctttcaattactttatgctcatctttagttaagctatccatatcaatcttgtaatggattaatagatgtcctaattcgtgggccaaatcaaaatttcttctaaccgctgattttttcttgcttccaagaataatgaatggttgatctgcattggtccaggtactatacgcatcaatactagaacccatatttttttctaaaatatagattcctgaaagttcaagtttgtaaagaagctctgaattatcttgtaaatctagcttctctctagcattctcagcaacactctctaaaatcgaaacacgatcattttttaccatgaacgtgttattaatttgtattgattcagatcttaacgaccgaatagtcgttgtcggtaaattaagtttaccttcaaatatatctaagaaataactagtatagtcgataaacatcgtttccatttttgtcttttttcgagcatctcgatcgtcagctcgatatgcaatactatcaactgtagaaacattagtcgtaaatggtgcggtatagaaaaactgagattttacattaaatatttttttcagttcattagttacttcaaatttcggtacggtgtattggttttcatactgccaaattgcttgttcacttaaccctaatttgtcagcaagttcctttctggagagaccatttaattctctaacactctgtaacttctctccgaaaaacatgataatcacatccttgcttattggttgaaaattaattcccagaattctcttctgcttcttcttcgggaacagagtatccgaatgcattcgcagttcctgagaaagtcgtctggttagaaaccttctcatttataattggttcaacatcttcaggagaaacttcgtactcactttcttgaattaaatagctcaaatcttcaattaattctaaattcattgtttgtgcgtttggcatcgttaattggacagaattaataagcttagtctgatcatcaatttcataagtcacaatataaaaacgtgagtaattatgctctacagacaattgagtcccttctattacagcgttgacctctgctggagcatttaattccagctgaatttgttcaggcttatcaacaaaattccgagttctattcttaaaaattggcgtatttatatcttttgccaaaccaactaaatagttatcctcgttaggtttatgcatatttctactaaaagacttaacaactcgtctagcattctttacaataagcatatagtcttcagcattctgtttaactgtaaactgcaaatactcccaagtgtacccagctttttctattttaaactgcacatcgatgtcctttccaattttagaaatttgatcatcgatatgatttccttttgtccatgcataagcgccactcacattcattgattctttttttctttgcgttcttcaagatagtgtaagtaaccttttaaagtgccatcaactattactttattaatggtgctgtctaatttaaactgatccatttacaatcccccaattaagttatttatattattatacgacatccttaaagtaaaaacattattttcttattttttttaaagtatcaaacgttaggtaatcaattctcgtatttttccagaaaataacaccttcaaaaaaacaccccacaaccataagttgtggggtgttttgcaaaaccgaataatatcggattgatattaacgttttgagaattgtgatgctttacgagctttcttaagacctggtttcttacgttccttcatacgagggtcacgtgttaacatgccagcactcttaagagctggacggaagtcagggtcaactgtcaatagggcacgtgaaataccgtgacggattgcaccagcttggcctgagaatccaccaccattaacgtttaccaagatatcatagctatctgttgtttcagtaattgttaaaggttgtttcatatctaaaatcaagttagcaaatggaacgtaatcaacaacgtctttgttgttgatagtgattttaccagtacctggtactaaacgtacacgagctactgagtttttacgacggcctgtaccgttataagttacttgagccactatagtttcctccttaaataatgtccgtaatgtctaagacttctggattttgtgcttggtgtttgtgttcgccaccagcgtaaacgtgtaacttcaagaattggttgtgacccaatgagttcttaggtaacatccctttaactgacatttcaattaaacgttctgggttgttttcacgaatttcgccagcagtacgagttttcaaaccaccaggatgattactatggtgatgatataacttgtcggttgctttgcgacctgttaatttaattttttcagcgttgatgacgatgatgttatcacctgtatcaacgttaggtgtaaatgttggtttatttttaccgcgtaagatagaagcgactacagttgatagacgacctaatgcaatatctgttgcatcgatcacataccatttacgttctacttcgcctggtttagccatgtaagttgtacgcacgatttattcctccaatattctgtgtttgtttgacactcaataagtttccggggcctatcgtggggcaaacaataccagatactatagtaccgtaatttattgattaagtcaatcgaatctcatatatttccagtctatttataataaacttcttttaaatacaaaccgcttgctggcgcggttgagcgcgcctgttgccgatccttcacttcatacaatcgtaaaaagtcatgtacgtcgcggcgaccgttaccgatttccaataaagtggccactaagatgcggaccatattatataaaaagccattgccatggaattcaaaaataagttcgttttcagcttcgttgtatacaacggttgcttcatagattgttctgaccttatccttgatgacccctccagcggccgcaaaactcgtatagtcatgcgtccccatcacgtcgggtaatgccgccttaatccgttcaacatcgattggataaggatagtgacccgtataacgccgtttaaacggattggtataatggcccagatcaacccggtacatataccgcttgccgaccgttgaaaagcgcgcatgaaaatcatcatctgccaattggctatcaaccacttccatatctaacggtaaaaggctatttaaggcccgtagcatgcttttagcggggagctcagatggatagtcgaaatgcacaacttggcccatagcgtggacgccagagtctgttcggccggaaccgtaaacttgaatataggcgcccttactcatcttggttaaagctttttccaaggtgccttgaactgtgcgttgcttaggctgaacttgaaagccggcaaaatcagtcccatcataggcgaccgttactcgatagcgttgtgtcattgtttctcctcttacttcacaaaatcattatatctattctagtcaattttctgaaaagtagcaaccctcctatcaaaataaacaccaattaataggtagcaaaaaagactgtgataaaagtcatcttaccccagtcctttttttaaataattagccaatctgatataacacatcccgtaaggcagcgtacttctctctaccttctctggtcacttctagttgcacagttcgttgatcatcatctacgttgtgcgccttcataatgtaatgcttattttgcaaagcattcaacttacgtgaagcagctgggggtgatgtgttaaatttcttagcgatttgcccaggtcggttattcccaagctcgatgatttgttccaaaacgaggaattgatcataagtcaaaccatacgcttcacttgctttgtttaatcggctaattttttgttgtgcatcaagataccactcactgatacttaaaattttatgattaccaaaatctaatgtgtgaggtaccatttgaagacgtaagtaaccagtgttaccattgtcgctgttatcaccaaatgaaatcccagcaactgttttatcagtttgtggtaattttgtgccaccattgtcatttgaagcagcatcttgtgaacctagttgtgatgttccagcaaatgatgcagttggtgccataagtgaaagtaatgttgcgccagctaatactgagcttgtcaattctgtgaatttcatgagaaattcctccctagaatttttagcgcataaagctaatttttattatatcacaaatattatatatagtcaatataatattcagtgtttataaccattttttagtgtagtccgtttaaaacccgtccaacaactacattgtgatcgttgtatagacgttgtagctatggtaaacaagagctgccatgatgccagttgcaatgagcgtgattgatagtatcgttactagcgcaatcatgccccatttcgtctttttataaccaaatttatttaccattctttgcatggagatccctctttcgttttctaacttggtgcactctgaagaaaataccaccgattatcactaaagtaatcgctaatccacctaaaatccaattacgatttctaagataggctgcgtttaacccattaatatatttagcctgtgaagccgttattaagacatccttatgaatggtcttggtatattgactgttcttcgtcgtcaaggtcatatcatatgtccccggcactaaccgcttccccccaagtaatagatcaacatagaagctcgtattcggtgctaccttaccgttcttcacagatgtcgtatattggataaatccccacttctgattctgtaacttaatcttaactttagctttttcaagatatacaggatcgggattattaagtttgacactaattgcagcctttccctctttagtgaagcgcgtcttaatcgaaggcgattctaagtaccgatagtccttttttcccaattgttgaccattaagaattagcccaatcgcatagcgataagcatttttaacagcagacttttgattaaattgatcagcacttagattaatcgctgtcgctttagtgcctttaaagccatcattcgttttaaccttaatggcaatccgcttagttgctcctgctggtaaactcgtcttttttggaacggtcactaactggcttcctggtttcttcaaaagttgctgattgtttgcgtgagaaccaagataatcaactgaggcattgtcattggtagttgcatccttcacctggccatagatgttaatcgtatgttcagttgggttataaactttaatccgaattgttttcacctgattaggcttaatatgaagattaaaataacctaactgcttgccgccaatattatctttgggtaattctggcattaacataaatgttgctttattagctgctggaagcttaatggtgctcttctttttagccgcttgtgctgtgccaattcctagcgtcaataccataccaaccagcatggtcattattaatacataccgccaatatttccgcatcacattaaccaatcctaataactttatagagtccgtatgctgcaactaataacaagaccccgttagctgccaagacgtacaaccatttattagttggacgttgaattgaacgtttatttaaatcagccgcagccgcttttgaaactttaaaggttttcttaaacgtccaagacattggtaatttattccaaaggttttcaccagtaacttttaccgagacttggtaggtgcctgccttcatgttgttatactcccaagaaattggaagtgtcacagatgaattaggtgcaatacttgagccttctttttcgtaaaggcgcttatcagagaaaaggcccttcttcgatacaacggctttgaaatgaacatttttcaaaatcataggttgtgtattacgaagtttaacccccatcgcaggtcgattattatacaaaataggttttgtcgaatcatatttcagttctggataaaccttataatgtgaccctcgcaagacgacactaatcatataggcgtaattactcgaaatcgtttgttcatcggttttattgtcacgatattcgataaaatgccaaccgccagaaatcagaccgttaaagttatcttccggcatcttaatcgttgcttgaataacagttgtttcttgtggtcctaagtgaagcacgcgatctgatttacgcacagccccaattgttgttaacgggattttagcactcggatctaaccctttagtagacgattgaaatttcatatcgccacccatttgagtcatcccattttgaaattcacttctaattgtgattttcttatccgtaaaattttgaacacgtatcttaatggtatgggtcgttcctggtttgaacttaacatcgaagtaattcaaactcgtatcaacttgaccttccggcataattggctggatttcaaaatctgctttttcagttgtagagtcggcctgaacttgttgtgacagcgcaaaaccgcccatcacgcctatggccaatcctaaaattatatttcttaataatcgttttctaaacacgatttgattcctcctatggtgcaaccgttaatgtccaatctaaagtcgttgtataggttgtattatcccgtttagttgtcgctgggacatgtaagccaatgctgatatcagcattcttcttatcaccaaattgatagtaccaactccccttaccttgatcatcgctgtaaggattgtttttattactttgatccttatcagggtcatcattctggaaaagcccaaccttggtataggtcattaaattcttgaccgtatcgccagattttaaattaaagctatcaaccgaagacattgcttgatttggcgttgtgttacccacatccgcaataacagtcccatttttaaattgtagttctgcatctttcaagacttgtttacgatcgtccgtaaacggtttttcttgtgcaacttgtaattgccatgaatcaacaccgtagtgatcagttactttaacggcttgtggtgtcttacgatcttctagatagtaggtactatctgtttgtgtccgattatgggtaccaaaatcccaataacttggtgcttcaactgaaagcatccgcttgtaatagccatacgtaatcgtccgaaccttatccgtaaagacagggtcatccttgtacgctttagaccagttagcgttcgttaaatcagtactttccgttactgcatggattgtatacccattgataaccttaggtgctactcgtgctgagttaacagtcgataacttagtgcctgaagtccctttttcatcaacttcagtggcaatataagttggctgacttaaatcgttatcttctaaatcaacgtaacggataatgatttcgccgatattcttcttcaaattcaatattgtttgattgaagttcattgtattaccagcaattaatacattttcagtcccagttgacgttgttttagtttctgtcaattcgtctgctgttaatttagcatcatttgtcaccactttatccgctgttaatgtattatcatcgacacttgcagtcacctgcatcttataactgatagttgctatatatcccggcttcaatggttgcgaaagtgtaatcgtctgatgatcagcactaaatttagcatttgtatctgtcgtttcattcgtcccatcagccttgctgattttaacaactaacggatagtcattaccggtatccggatcactaaatgaaagtttatcggacttcttcatcataatcgtattaaccttcatgttggtgatattccccgtattgtcagctgctgctgttaccttgtaacgataatcgatgacatcccctttaccggcagttgtttctacacggtaaccatccttatcaggatatttagggtctgttgatgttgatgtatcttccgtcgttgtattcttgagcgtttgttcaagtttaacttctttcttattccggatcttcaacttcgattggttagcttttgtcttatgttgataattagcaaccgtcttatccgttaaatcaccggttaagttgtcagcgtagaagttagcatcattcgtaatatcttgtgtcttagcattatccttaaccaatacttgatatttgaccattactttcttgtctgcatcaagtggtgtcttcaaggcaatcgccttaagacttgctaaagtgcctgataccgtagaacgaaccattgttgaaccataactgatttgaatctgtttatctggataaccatcaagtgatactaattccaaatcatccggcacattcatcgtaatatcttgaatagcagcatttgttaaagcctcatcattggtatactttcctgacgtactatcagttggtaacgtaatatcaaaacgatacataatctcatcaccaggtacagccgttgtttcggccttaccatccccatatccaggaccaaaccatgcttgtcccgaaatagccgttgctggatttctaataaattgttgaatggttgccgtgttcttttgtttcttcaatgtcaatgtggttgtattaaacttgcctttatcagcggcagcggtgttggtctgatctgtaaacccgttagctgtcaaaagcccatcgttgtttacgtcgccatccatatccgctgtaaccttcatcttgtagttcaccattaatacttgtgatttcttcaatgcgacattcttaagcgtaatcttcttcgtgcccgctgttgtgccatcactcatagtgacattagcagtagggacggctgttccacccgctgttgcggtaatgcctgttaggtagtccaacttgccggctggatccatcacaatgttatcaatgacgatatccttaacatcagcattgttgtctttatcagcagtaaccttgaaacgataatcaattgtgtcgcctttagtaccagatgcttttggaccaaaagctgtttcagctgctttatcttgtttcaattgttgactgattgtcaccttatctttacggacaatgtgtaaaattgattggttcgcttttgtcttgttttgataattagcaacagtcgtatcttttaaatcacccgttaagtttgatgcgtagaagttcgcagcgttggtaacgtcttgtgttttagcatccggcatgatgttagcgccgtagtaaacaagagcctctgtcacattcttagaaagtggactcttaaggtcaaggtttttaatatccttaatcgaattaatagtatcgttatactcagaaacttgaccttcagtacccgtccgatagctaatttgaatcttatgagtcgtacctacaacattcgctagctctaaatcatccggtacattcatcgcaatatcttgtaacgcactattcaatagatcagcgttattcttcggatcggtcgttggaaatttaatcgaaaacttgtacgtaactgtatccccagggttaacagttgcttccgcaggtttattattaggcgccggttcatccggcccaatccatcctgaatttgtattcgctacattatctttaagattaatactttggctaatctttgccttattggatatctttttaagggttaaaacagttgtattaaatttccctttatcagcggcaacggtgttggtctgatccgtgaaactatcagctgttaacagcccatcgttcttcacgtcgccatccatatccgctgtaatcttcatcttgtagttcacaattaataattgtgttttcgacaatgaaacattcttaaccgtaatcttcttcgtgccggctgttgtgccatcactcatgacgacatccccagcagggagcgctgtcccctgaagcgttgctgtgacgccagcttggtaatccaacttgccggctggatccatcacaatgttatcgatgacaatattcttaatatcggtactattatcatcgccagcagtaaccatgaaacgatagtcgattgtatcgcctttaacaccagtttcggtcgtcttaaaggtggttgccgaatcttgtttcaattcttgtttgattgtgacgttatctttacgcacaatgtgtaaaattgatttgttagctggtgttttatgtgccttgtcagctactgttgaggttgctggcatatcacccgttaagtttgatgcgtagaagttagcatcgttcgtcacattttgcgtaccagcgttatcattgatcttagcgctgtactcaattgtcatccctttgccttttgttaatggcgtgaagacatcgtttaattctgcattcgcactgatgggattaccactaatatattgtggtgtcacaccatcaactgtgactttcacctgctttgtattatccatagaaccttctgggttaactaaagtcatcccactcgattctttcatcgcaatatctttcaaagcagtatctagtaaatcagcgctattcttcgcacctggtgcaatagcaaatttgtaatcgataatgtttcctggaacaccacttgtttcagctttatcaccagtcacattaggacctttccaagtttcaccagccgtattccggttcttaatgaattgcttgattgtcgccgtatttgaagccgcggctgtattcaaggtcgttgtattaaatggtgttgcttttaagtttgtggcagataactttgcatcgttggtaattgtattcgcgacatcatttacaaccttcatctgataggttactttaaaagtcgtattcttaggcaagtcgcttgtaatcttaacggtgttaccattacctggaacctgcggtgttttttcctgtacctctgagccaatcgtaatttccaatgaatcatcaatataagacatttcgtttggtttattcatgttaaaagaagaaagcagaagatcctttatagcgtctgtgttatccccagctttaccagtaaacgtatattgaatgatgtcattttgtttacctgacgtttcaacagcaacatgcgttgttgcatcattcttatcatttgctggtgtggttgtattactaatcgtttgttttagatcagttaccgttattggttggtcttcaatctttaattttgcaagattaaagttatccttatcggcaatcggtgtggttaacgaagctgccgttaacttccctgtttgatcatgttctgttgttgtcgtatcgattgttgcatcatcattaactgttcgattgaatgttacttcaaccttttgaccagctttgattgacttatcaatcttaatggaataagtctcaccatcactacttggtgtagctgtcccatcaactgtttctgatgtatcggctttagtcgtagaaggcgttataatcttaacttttacattcgttggtgctgttaattcatcaggcgccatcttaatgtcgctgatttcagcatcgctaattccagccgaattgctcgttttagcagtaaatgcaaatttgtagttaactttatccttacgatgaccagtaacaccggttgtccctaatgtccaatcagtgtcggcatcaagtttaatgtactgttttaaatcttgaacttcacgtttagcatctggtaccttaacatgtccgaaggcttcattactatcccagccttcttctgttgcaccagccactttaactacatccagatgtgcggtgttggcgattttcgcatacgtatgtttgacacccttgtcgtccgttgccgtcatggttggtaagctacctaaatcggcatcggatgcaactgatgtttcaatcttcatattatacgttttagcgtagttatcttccttgcccaagaaatcagccttcgcctttgccgtcactttgttaccagtcgtatcaatatcaaaattagcggttacgtccgtgaccccattttgcataatcgtgactttattaacttttaagttcttattaaccggatcggttagttcaaacttctccgttggatggaaggtactaattgtgccactttccgaattaccatgttgcggattcttaattgtgcttccccgatatggcaaggttgcaacgacgttgtagttaacatcattgtcgtcccaatcttgattccactcatcgccatcacctgacttccaaggtgcagaaaacgccactggtacgagcgccgttggtaagaaatccattcgttgccaatctgaaaccgcatattcgacagattgcgtctgatggaacgtaacggtcgcccaagcatctgtattgtcggggttaataacttcattactattcccccattcaccaccattattagcaaaatgtccatctctgtcagtatattcgttatttccgatattattgacaatcaccgttgatggatcagatgcaggattaaatgttccttttaaggtattattcgaaaccgtgttatttgtgacataaacgccctgaatattactatccttagaaaattgtagaaaatcgcggtgatctaaatcggcaactgtgaagaagccagaaatcgtaatcggtttacccgtttcattatcataaaattctagtcttacctttgcagcttgtcggtattggccatcagctttagcataattagaaggcgtaccaccatctggtgaagtcattttagctaatttaaaagcatctcgttgaaaagtactcccaatcccgaacaacccttgacgattttgattagtgtttgagcctagaccataaccgaggctccatttggccataagatcgtccaaattggtagatctatatccttgcgctttatattgtgaccagtcattataccaaccatgcttttcaaggcccatgaatttctgcttcacatcaacccaatgttgttttccgttttcgtcccgaaaggccatgattttcgtataatagatataatctttatccccatctaagccttctcccgaaagctgataattagtgctagtttttaatttaccataaatcgtctcagtcgaaacacctggaatatagaccggaaacgcgttattcggataaggaatttcgttgtacgaatcatctggtgttaacgtccctgcaccatcagagactgacgtatgtgcattcccagcggaatcgtaattgacagtaatcacacctttttgtgatgataatgtcttactgaaatcaggaaatttgtaatcagtatcggtaattgcacgcggcttaatcaaaactgacttaacttgtttttttgacgtctcttttttttcactacttttcttagactcactcttcttagatgtttgttgttcactagacgattgaacaatactttggctactgctacgaagttgcgaagagccactgacttgcgtaatcgctttgctactatctattatttgggatgtcttttcactattatcactgccttgtgttgctgagaccgctaatacagcacctaatgattgcacgactgttgtcatcaatagaaaaattattaataaactatagacaattcgcttcttcatgctaaatatcctcccatgttgttctgttacgctatgtaaccgtttatcaatcttcatcattcaacaacagcttacagcgcgctaactcaaatattacgagcaaaaatcataactcttgagttatgattctatttataaatggattcttaataagatacactagatacccccattaacaaaacaagccattaatttttatgaagcccgttagaatagcattaaaaaatttagataatcgtgttaattgccttgcgtgctattaaacaatggtgtaaactaactctagagttgataattcgcaaatcaagagttgtgatttccgttttcactaattaataaatttcttctatattaaaaatatagataagaatactttaggttagctatttacgcttaaaatttttactttaactaattatgaaattaaaaaataacagctcattatagacgttaaataaatcacatatagactattttctatcaatttcctctgattaatcattaataagatgtcattttagaattaatataatcaattatattaataatgattaatccaaacattaaaatatgattgatattcgtcatatttattaaccaattaagcatataaaaaagaagctcatcacctttccagtgacgagcttctttttatttacatgattatttatttttaatcgttgagattatgctgttggcataactaacagaattgacttcccgctcacttgatcaccgttatgctctgtgaaagcaatatttgttggtaaactagcttgatcaatttgtgatgtgtcaaatgaaaatgataggccatcttcactaacggtcacattgtactttttgttggtaaacatatcaaccgcttcaatcgtatgacctggcgtactgattttaccgtttacaacttcaccccatttaactcttgttgcgtccaatgaaggtgctggtggtactgcattatcatgttccacaatcgctgtcccaaatcctttagtccctaatgctgttgtttgatcagcaaatagttttgtaccagctttttgttggataatatcagcaatgtaagtcccgtctacgccagcaattgctgtcccgataactggaccatcttctgaattagcgcgaatcttaacagttgatccggctggtgcgttaccaccaattactttcgtatcagtatctttaactggtgtatgaattgttggcacttggttaacgattgtccaaccttgatctaatttatcccagttgattttaccttcagattcagcatttcctaataagctccagtctggaattgcgtctgctgaagaaacaactgacttgaattgatagaatgacttgttataagcatctggaattcgttcgcctaaatctgtaatcgcttgacctaagtcgatataaacatgtgcttcaagtgtttgactgctaagtaagttaaacaagccgatttgattttgtaagattaaaacgttatttgtacgatcgtatgaaatatctgagcgtttataagtatatttctgtgtatgtccaccttgattattaggtgcatagaagtaacttgatggttcgatataatctaagaatgttttaccatctgctgttgttttattcattaacgctttaaattcatcaggcattacgatttgggtttttgttttttctccccatgcaagagctacagttgtcttaccagtatatgaaatttgtaaaataccagaagtcaatgagaagtcatttgatagatgaacaccctctaacatatttgatccttcaaaagttgttgatccttccgttaagaatccgatgcccgcttttggatctgcaatcttagattgtgcttttgtgtccaccttttgcgttgttttcgctgaaccattatctgcggcccgtactgttgcaacacccgtgctcaccatcaaacccaatactgttgatgatgctaataatacactaaccatttttgtactcttaatcataattttcgcctccaagtgcgttttatatttttagctcagcgattattagtcaacgacgttaattgcctttgctatgtgaataatgtatcatctctttttttgatagtgcaagtgatattttcgattagtttttactgatgttacaaaactcactggagctgtaagcgttacaaaaataaacttttttaaatttcttcttccgagcatgttatttttttaacttgtttactattatattttgagacatgtaaatataatctaatccttatataaatcctattataccggctgttttcaggattcatgataggattagaaataattaaccgtcgatactaaaaaagcattatctgtaaaatcaccattttgaggtcattttatagacaatgctttttgaattgttcattaacgtaatatcactaaaccaaccgttaataccgccattgcaacaaacgcgagtgtatctcttgtttgccattttaggacgcggtatttactgcggccttcgccaccttgatagccacgagcttccatggcagtcgctaagtcatcagctcggttgaagctgctgacaaatagtggaattaagatggggataatggatttcatttgttgcaagagactaccttctccgaaatcaacaccccgcgcacgctgcgcattcatgatcttcgtcgtttcatccatcaacgtcggtacgaagcgcaatgcgattgataacatcaatgcgacttcatagactgggaagtgaatgacttttaacggcttcagaatcgattcaatcgcatccgctaatgataacggtggtgtcgttagcgttaagagcgtcgacatgaagataatcagcacgaagcgcatgaagatatatgccccattgagtaacccaaacttggtcagggtcaagaagccccattgccaatagacggtccctccacgcgtgaagaagatttggagtaagacggtaaagaggatgagccataataatggccggacccctttcaagaagaaactgagtttaattttcgaaattagaattaaggccatcgtgaaaacaaataacaagagataagctggccatgagcgtgctaagaaaatgatcccgatgtaatagaaactggcgattaacttcgcccgcgggtccattcgatggagaattgaatcccccggaatatagcggcctaagattagtttattcattagcgccacctgctccctgcggtaattgatcgcgcaacatcgctgctaattcgtgttctgttaatggtaccttagggaatacaaagcccttcttgattaatgcttgagcaaactgcgtcgtggttggtaggcctaattgcttagacgttagccactcagggtccgcaaaaatttcgcgcggtgtcccactcttagcaatcccgccattttccaaaacaacgacatgatctgcatagttggccacatcgtccatttgatgcgtgaccatcacaattgtcataccttgttcgcggtgtagtttttcaaacaaacccatcatttcccggcgtccgactggatcgagtccggcagttggttcatcgagaattaagacctctggctgcatagccaagacaccggcaattgcgactcgccgcatctgaccaccggataaatcaaacggtgattgttctaaaacggcttctggtagaccgaccaattcgaccatcgctttagctcgttcgagcgcctcagcttcagggacaccgaaattttggggcccgaaggcaatatccttttgtaccgtggcttcaaataattggctttctggaaattggaagaccataccgactttttgccggatgaccttcaagttcttattattcgtttcaggcgtaatctggcgttcaccaatctgcacgaccccttcagtcggcttcaacaacgcgttcaagtgttgcaataacgtcgatttgccactgccggtatggccgattaatgccgtataagagcctgattcaatcgttaaattaatgtgttttaacccaatcccttgaaaaggtgtcccgggttgatacgtataacttacatctttgaatgtaatgtccataggtgatcaaccatcctttccgttgtgagatagtcaactggcatcggtacaccgagcttagtaagtgctgctttgagtttctctggatatgggacatctaacccaaggtcgagcaggcgttgcccatatgcgaagatttcggctggtgtcccttgatcaatcacttgtcccttatccagcatgacaatccgatccgcactagcggcttcgtcaatatcatgggtaattgaaagcacggtcatattcgtttcttgtttcaacgtatgaatcgtctcgaggacttcttggcgacccttaggatcaagcatacttgttgcttcatcgagaatgaggatctcaggttgttgggcaataatgcccgctaatgcaactcgttgcttctggccaccagataaacgacttggttcgcgcgtcataaattgggtcatacccacgcggtcaactgcatcttgaacccgccgctgcatttcagtccgttcaatcccttggttttcaaggccaaacgcgacatcatcttcaaccgtcgcaccaacaaattggttatctgggttttggaaaaccatgccaatcttacggcgaatatcccaaacggtttcaatcgataaaggcaagccatcaatcgtaatatctcctgactgtaaatctaataagccattcagggatttggcaaacgtactcttgccactcccattatgcccaataattgcaacccactcaccagcattgatgctgaccgataaatcattaagggccaagcgactcgcctgtgggtattcatattttaaatgtgtcacttctatgattttattttcatccattgagaatacctaatttcatgatttagagtgccgtttcaagcggtagcttctgagtatagcataatcagtcaaattaacgatgtaatcgttgatttgactgatgtcgctagacggaagaagttgcttgaaaaggcacgttttcgataagaatgccgttcaaagcgttttggctctgagcattagcctagtatcgtgaataagcgatgtaatcgattatttgcgatgcgtagctaagcacaggaagttactactaatggcacgtttcactttagagtgccattaaaagtggttaggttccgagcatttacctagttccgtgaataagcgatgcaatcgcttgtttgcgggacgtagtaaagcacaggaagttgctactaatggcacgtttctactaaaatcgccccaccacttgcttctagggctgcgaaactaccctctattttatcatagaatccccttaaagtggctgtgtaagtcgctctgtttataaatccacttaacacaaaaaacgcctaactctgtaaacagaattagacgttttattatgtaaatcatcaatcgatgaaagttatgctgtggtgctaacataaccttaggactagacttggcaaataaatgccatcatcataacgccctgtctcatcgatcaaatgacctagaaatcattttttattattaaacaagttcaataataaccattaatgcaccgtcaccacgacgaggggctgttttaagaatacgtgtgtaaccaccatttctttcagcataacgtggagcaatgtcactaaataacttttgtaaagcagattgaacgattactgcttcgtcttcttcgcgaatatcagctacttcgttacgaacgaatgctgcagcttgacgacgagcgtgtaaatcaccgcgtttacctaaagtgatcattttttcagttgttttacgaatttctttggcacgagcttcagtagtaacgatacgttcattgatgattaaatctgtagtcaaatcacgtaacattgctttacgttgagagcttgtacgacctaatttacgataactcatgaatggagtccctccttcttatcagtttattcttctgtgcgtaagcctaagccaagatcaaataacttgttcttaacttcttctaacgacttgcgaccaagatttctaactttcatcatatctgcttctgatttgtcagttaactcttgaacagtgttgataccagcgcgtttcaaacagttgtatgaacgtactgataaatctaactcttcaattgtcatttcaagcattttttctttatgcgtctcttctttttcgaccatgatttcagcattcttcgcttcatcagtaagatctacaaagattgccaaatgctctgtcataatcttcgcagctaagctaatagcttctctaggactgatggaaccgtttgtccaaacatcaagtgttaacttgtcgaaatcgttacgacgaccaacacgtgtactttctacttgatagttgacacgactgattggggtataaattgagtcgattggtaaaacaccaattggcatatcgtctgacttgttttgaacagcagcaacataaccacggccttttttaactgtcattcgcacgtggaaattgccgccttcagctactgtacaaatatattgatcagtatttaagacttcaacatcgtcatccgaaatgatatcagcagcagtaactgttgctggtcccttaacgtcaatctcaatcgttttgtcttcttcaacgtgcaatttaagtgctaattttttgatattcaagatgatttgtgtcacgtcttctaggacgccatcaattgttgaaaattcatgtaagacaccatcaatttggatatctgtgacagcagtaccaggtaaagatgccaataagatacgacgtaaagagttacctaaagtcgtaccgtagccacgttcaagtggttcaacaacgaatttaccgtagttagtactttcatcaacctttgtaatgtttggtttttcaaattcgatcattcttatcttttacccctttcaaaacgagaagtgtttatacgtgaacacgtttcagtttgtctcaaaatgaagcgtagcccagactaaacacgacggcgttttggaggacgagatccattatgaggaactggtgtgacgtcacgaatagcagtaacttctaaaccagttgcttgtaatgagcggattgcagcttcacgaccagaacctggtcccttaacagcaacttcaatagatttcataccatgttccatggcttctttaccagcagcttctgcagccatttgagcagcaaaaggtgttgacttacgactacctttgaaacctaatgaaccagcagatgaccatgcaacagcattcccgttaggatcagtgatcattacaagagtgttgttaaatgttgagtgaatatgtgctacgccagcttcgatatttttctttacacgacgcttacgtggtgcattcttcttgtttgccataaattataacctccttttactgattattttttcttgcctgcgatagaaactttcttacctttacgtgtacgagcgttgttcttcgtgttttgaccacgaactggtaaaccacgacgatgacgcatgccacgataagaaccgatttcttgtagacgtttgatgtttaagctaacttcacgacgaagatcgccttcaactttaactgtatctaatgctgcacggatcttgtcttcttgatccggcgttaaatcgcgtgtacggacgtctgttgggacgccagcatcagccaagactttaacggcagttgtatttccgattccgaaaatataagttaaagcaatcacaatttgtttatcacgtggtaaatccacacctgcgatacgagccattcttgcacctcctgcttattaattaaccttgacgttgtttatgttttggattagctgcgcagataatcataacgcggccttttcgtttaataactttacaatgttcgcacattggttttactgatggtcttactttcatatcgactgacctccttgatatgatccttacgcctatttaaagcgatacgtaattcgtcccttagtcaaatcatatggtgatagttcaactgtcacacggtctcctggtaaaatcttgatgtaattcttacggattttacctgaaacgtgtgccaaaatcacagcaccgttttcaagttctactttgaacattgcatttggtaaagtatcagttactttaccttcaatttcaatgacgtcatcttttgccacgcaaaagtacccccttgtggttatgaaaattcatacagaaaaatggtgagagctctccgcactcaccctagtgtcataccgagatattatatcacaagcattaaatttttaaaagcactgattacttagtcattaacaacaagtcaggcttttacgtgaataatgacctaaaagatcacttgagttgatgactagtctttaatggtatcaagtacttttttaacggcagcgaacacgtcatcaatttcttgattcccatctaccgtgtaaagcaggttacgtttttcataaaaatcaagtaaaggtgtattcatttcgatattgacctttaagcgattcttaaccgtttcaggtttatcatcttctcgttggaagaagacgtggccgccacagcgatcacatgtgccttccacttgagttggatggtaaagcttatggtacgttgcaccacaagttttacaaatgaagcgaccagataaacgatcagccaagatttcaggatcaacatcaatgttgatcacaccatctaaaggtttgttcaatttatcagtaatcactgccaaagcatccgcttggtcaagtgtccgaggaaaaccatcaagaagataacctacattagtatctgcttgtgaaagacgttcctcgacaattccgtttgtcacatcatctggtaccaattcacctttatcgatgaaggccttagctttaacaccaaggtctgtttgatctgccatagcagctctaaacatatcaccagttgaaatgtgtggaatatgataagcgtcaacaatcttttcagcttgcgttcccttaccagcgccaggaagtcccattaacatgagattcatgcctttgcctcctatttaaaacaaggattcaatactttttaaacgataattgcttatcgaatgaagccaacgtatttccgtttcatgagtaaaccttcgagttgacgagtgctttcaagcgccacaccaacgacgattagtaaactagtcccacctaaaccaattgattgaggtagaccaccgaggtttgctgctaattgaggtaataatgcaattacccctaagaacaacgcaccgacagtcgatagtcgcattaatacgctggagagatatttctcggtacctttacccggccaaacacctgggatataactcccttgtttggtcaagttctcagcaactttttcagggttaacctgaacaaatgcgtagaagaaggtaaagagaataatgagcaccgtataaacaatcgaacctgtcacagtttgcatactgaagatgtctgacataactttgaaccaagcatcttcaccatgacttgcctggaaggccattaagattgtttgaggtgtcataataaatgaactagcaaagataaccggaatcacaccagcaacattgacctttagtggtaagtaactgttgtcacctgcacctgcttcgcgacgtgtatattggattggaatcttacggttcgcttgttgaacccaagtaacgaaagtcacaatgactaataccgctacgattaagccaacaacgaacaagattcctaaccacatttcacccttagaagcattcaagacatgttccttgatgatttgatgaaggccacttgggaggcgcgcaatgatacctgcgaagataatcattgaaacaccattccctaaccctttatcagttatctgttcacctaaccaagtaattaacatcgtaccacccgtaaggatgatcccgatgctaacgaaggtcttaattcctggatctttaaccaagcccatttgactgagtgagttaaagccagcagtaatcccaattgattgaataaacgctaagatgatcgttaagtaacgcgtcacttggttaagtttacgtctcccaatttcaccttgcttgctccattcaacaaatttaggcacaatgtccatttgtagtaattgaaccacaatttgggccgtgatgaatggtgaaacccccatcgagaagatggagtaattcgccaagccaccaccactaacagtatcaagtaaaggaatcaaaccagttgatcctaacttggttaacgcgccagcgttaacacctggtactgtaatctgtgcacctaaacgataaacgatcaaaacgcctaaagtgaacaaaatcttactacggatttccttgactttaaatgcgtttcttagtgttttaagcaattaaatcacctcaattgaaccgccagcagcttctacagcagcttttgcagcttcagaatacttgcttaccttaatgttcaattttttgtttaattcaccatttgctaatactttaacacctgaaagttcgttcttaacaacacctgcttcgattaatacagttgctgtgatttctgtaccgtcttcaaaacgatttaaatcgttaaggttaacgacagcatattctttgcggttgatgttcttgaagccgcgttttggcatacgacggaataaaggcatttgcccaccttcaaagcctaaacgtaccttactacgagccttttggcctttttgtccacggccagctgttttaccagtacctgaagacgtaccacgaccgacacgcttgcgaacatcgcgagcaccttcgttaggtttcaattcatgtagtttcattattgtgcgcacctccttgcaatatatgttgaaattagtctttaatttcttcgactgttactaaatgtgcgagtttgaaaatcacaccgcgagttgcagcatcatctggtttgattacagaactatttactcggttcaagccaaattctttgaccattttacgttgttctggaagacgatgagcagcactttttcttaaagtaatctttaatttagccatgttcagttatcctcctagttttgtaagctttctacagagatattacgcaattctgcgatttgttcagcagtcttcatacgagttaaaccgtcaattgtggcacgaataacgttgatagcagttttgctacccaatgttttacctgtcacatcatcgattcctgctaattccatgacggcacgaacagcgccaccagcggcgataccagaaccttcaacggctggttttaatagaacacgaccagcgccaaagcgaccgataacttcatgaggtaaggttgtaccaaccttaggcacattgattagattctttttagcgtcttcaacggctttacgaatagcttcaggtacttcttgagctttaccagtaccgaaaccaacgtgaccgtttttatcaccaacgattacgatagcagcaaaacgtagacgacgtccacctttaacaacttttgtaacacggttgattgaaacaacgcgatcttctaagtctaaatgagttggatcaatgtaagtcataaatggttttcctccttattagaattctagtccgttttcacgagcagctgtagctaaagcagcgatacgaccatgatataaatagccgccacgatcaaagacaacaactttgtggcctgctttaactgcacgttgtgcaactaatgcgccgacttgttgtgcttgttcgactttagttccttctacttttacttctttatctaatgttgaggcacttgctagcgtcacacccgctacgtcatcaataagttgagcgtagatgtttttgttagaacggaaaacgttcaagcgtgggcagtcagcagtaccagagatcttgccacgaacgcgtgtatggcgtttttgacgtgtcttattcttgtctggttttgaaatcacaattttcacctcttaatgttgtttaaacagctaggctgctttatttaccagttttaccttctttacggcgaacatgttcatcagtataacgaatacctttgcctttgtaaggttctggaggacgtacatcacgaatttcagctgcgaattggccaactttttgtttgctaataccgctgataatgatgtttgtgtttgatggcacttctacgttaacaccttctggtgcttccatttcaactggatgagaataaccaacgtttaatactaaagttttaccttttaattgagcacggtaaccaacaccgataagatccaatgtcttcttaaaaccttccgttacgcccaaaatcatgttgttcaagttagcacgcattgtaccgtgcattgcacgatcactatcactattacgtgtaaagttgataaggttaccttcttcgtgcatttcaatgattggattgaaatgacgtgttagttcacctttaggtcccttaactgtgatgttgttttcaccgtctttagtaacggtaacacctgcaggaacttcgattacttttaatccgatacgactcacgttacagcacctccttaatttgagtttagattaccaaacgtatgcgagaacttcgccgccggcagccttttcacgagcttctttgtctgttacgacgccgttacttgttgagataatagcaattcctaaaccatttaataccttaggaacttcgttagcttttacgtaattacgtaaaccaggttttgaaatacgtttcaaaccagagataacacgttcgttattcttaccatacttcaagaatacacggatgataccttgtttgtcgtcttcaatcacttcgtaatcgcggataaagccttcgcgtttcaagatttcagaaatatcttttttaatacgtgaagcaggaacttctaaagattcgtgacgtaccatgttggcgttacgaatacgtgttagatagtctgcgataggatctgtcatgaccatgtggattaacctcctttattgaatcttttgattaccagctggcttttttcatgcctggaatttggcccttatgagctaattcacggaggcaaacccggcaaagcttaaacttacgatatacagaatgtggacgtccacaacgttcgcaacgtgtgtattcttgtgttgagaattttgcaggacgatgattctttacaactaaagattttttagccaagaaattgacctccctttttatttagcgaatggcatgccaaattgtgttaacaattcgcgtgcttcttcgtcagtgtttgaagttgttacaataacaacatctaaaccacgaacgcgatctaccttatcataatcgatttcagggaagatcaattgttcgcgtacacctaatgtataattaccgcgaccatcgaatgattttgcactaacaccgtgaaaatcacgaacacgaggtaaagatacgttaactaatttatctaagaaatcgtacattctttcgccacgtaaagttactttagcgccgattggcataccttcacgtaaacggaagccagcgattgattttttagcttttgtgattaatggtttttgaccagcaatcaaacctaattcttcaacagctttgtccaagttcttagcgttagaaacagcatcaccaacacccatgttaagtacgatcttttcgatcttaggtacttgcatgcttgatgtgtagttgaatttttcgatcaacgctggtgtcatttctttaacatatttttcttttaaacggttagtcatgtaaaaagtgcctcctttccccaaaagattatttatcgattgattctccagttttctttgacacgcgtactttcttgccatcgacaactttgtagcctacacgagtagcttcgttgtttgatgggtcgattagcatgacgtttgaagcatcgatacttgcctctgtatcaacaatcccaccattaggattttgagcatttggcttaacgtgctttttaatggtattgataccttcaacaacaactcgaccttctttaggcatagctttgatgattgtaccttctttacctttatctttaccgctgattacttttactttatcaccagttttaacaaacattgatatacgcacctccttggtagtctgtaattatagaacttcaggcgctaaggaaacgatcttcatgaaatcactgtcacgtaattcacgtgcaactggtccgaagatacgtgttccttttggagtcttgtcatcattgatgataacagcagcgttttcgtcgaacttgatgtaagaaccgtctacacgacgagcacctgacttagtacgaacgataacagctttgacaacttcaccttttttgacaacgccacctggtgttgcctgtttaattgttgcaacgataacatcaccaatattggcagtcttgcgacctgagccacctaaaactttaatagttaaaatttcacgggcacctgagttatcagcaactttaagacgactttctgattgaatcacttataggtcctccttccgtcacttaattatatgagtaacgatttagataataactgctttttcaacgacatctaataaacggaaccgttttgtacgtgacaaaggacgagtttccataacacgtacaacgtcgccaacttttgcttcgttgttgtcatcttgtgcataatatttctttgaatatttaacacgtttaccgtattcaggatgtgttttataagtttcaaccatgacagtgattgttttatccattttgtctgaaacaacacggccttggtacactttacgatggttacgactttcttcgctcaaagtaaatagctcctttccatttattatttgttaagttcttgttgacgtaatacagttttaatccgtgcaatgttctgacgaacttgctttaagcgggcggtattttctaattgaccggtagcttgttggaaacgaagattgaataattcttctttgtattggtgttctttttcaagcatttcagcagtggttaattcaataatatctttagccttcatttgactcgccacctacttcctcgcgttttacgatcttagttttaactggcaatttatgtgatgccaagcgtaatgcttcacgagcaacttcttcagaaacgccgccgatttcaaacatgatcttttcacgttttactacagcaacccatccagcaggagcacccttccctgaacccattcgaacgccgacaccttttgcagtgtatgatttatgagggaaaattttaatccacactttcccaccacgtttcatgtaacgagtcatggcaacacgggcagcttcgatttgacggttggtaatccaacttgattctaatgcttgtaacccgaattcaccaaaagtgacttctttgccaccttttgcagcaccgcgcatcttcccacggaattcacgacgatgttttacacgtttaggtactaacatgtttatttccctcctttcgtattgttgttggctttagcaggtaatacttcgccccgataaatccaagtcttaactcctaatttaccgtaagtagtcatggcttcgtcccatgaataatcgatgtctgcacgtaatgtatgcaaaggaacagttccttgagcatgtgtttcgatacgagacatgtcagcaccgttcaaacggccggcaacttgagttttgatacccttagcaccagcgcgcattgtacgttgcatagcttggcgttgagcgcgacggaaagcaacacgtgcttccaattgacgagcaataccttcgcctactaaatgagcgtctaaatcaggtttcttgatttccacaatgttgatgtgtactttcttgcctgttaagttatttaaagctttacgtagattttctacttctgagccgcctttaccaatgaccataccaggtttagcagtatggattgaaacgttcacgcgatttgcagcacgttcgatttcaatagtagagacagatgcgtcagctaattttgtgttgatatatttacgaatcttaagatcttcgtgtaagaatgttgcgaaatctttttctgcataccatttagcgtcccaatcacggatgacgccaacacgaaaaccggttggattaatcttttgacccacgcgatatccctccttatgcttctttttctgatacaactacagtgatatgacttgtacgtttgttgattggtgatgctgagcctttagcgcgaggacgaaaacgtttcaatgttggtccttcgttagcgtaagctttcgtaacaaccaagttttctgcgtctaagtcataattgtgttctgcgttagcgatagctgacttcaaaactttgataacaactggtgaagcagctcttggtgtaaattctaagattgcaattgcttctgcaacactcttgcctctaatcaagtcgattaccatacgcactttacgtgcaggcatgcgaactgacatagcactagctgttgcactagtaatttgatctgccattgagattcatcctcctttctagcgtgcttttgttttcttatcgtcatttccatgaccatggaaagttcttgttggtacaaattcgcctaatttatggcctaccatatcatctgagatgaaaacgggaacgtgtttccgtccatcataaacagcgattgtgtaaccaataaagctagggaaaattgtcgagcgacgggaccaagtcttgatgacttgtttcttttcgctgtcggcttgtgcttcaatcttgttgagcaagtgagcgtctgcgaatggtccttttttcaaactacgactcattatgaaacctccttcgaatgaaaagtgcaacgtgccctaattgcttaggccgcgttggctttggataagttcaattaaattgattatcttgatttacgatgacgaataataagtttctctgaacgagccttactactacgagttttcttaccaagtgtcttcttaccccatggagacataggagaaggacgaccgattggcgctttaccttcaccaccaccatgaggatgatcgttagggttcattactgatccacgaactgtaggacgaatacccatccaacgtttacggccagctttaccaatcttgattaattcgtgttgaccgttaccaactgtaccgaccgttgcacgacatgtaagtaggatcatacgtgtttcgcctgaagttaaacgaacgatagcgtatttgccttctttacctaataattgagctgatgtaccagctgaacgaaccaattggccgcctttaccaggttttaattcgatattgtggataagagtaccatcaggaatattagctaatggtaatgcgttacctactttaatatcagcattaacaccagattcaacgatcatacctacttcaaggcctttaggggcgatgatgtatgctttgataccatctggatattggattaatgcgatatttgatgttctatttggatcatattcgattgacttaacagtcgctttgatatcatccttaatacgcttgaagtcaatgacacggtaatattgtttatgaccgccgccacgatgacgaacagtgatatgaccatgtgcattacgaccagcagtatggctttgggattccaacaacgtcttttcaggggttgtctttgtgatctcagcaaaatctgagctggtcatgttacgacgaccatttgtggttggtttatacttaataattcccacgtgtatgccctcctataatttattctatttaatgttaattaatcttcaaaaatcttgatttcttttgagtcagctgttaatgtcacgattgctttacggcgtttcttagtgtaacccgcatagcgaccttggcgttttaacttgccacgaacgttcatgatattaacgtttttaacgttgacaccaaagatttcttcgattgcgtaacgcacttgtgttttgttggcacgaacatcaacatcaaatgtgtatttcttgtcgtccattgcagccattgagctttcagtaactactgggcgtaaaataacatcgcgtgcttccattatgcaagcacctcctcaattttagaaagagcagcttgagtaaggattaatttttggttgcctacaacgtctaatacgttgataccatcagcaggaacaactgttacgttaggtaagttgcgagctgataaagcagtaaaatcatttccgtcttcaagaactactaatactttagtattaacatctaacttgttaagtacttcagcgaattccttagtcttaggtgcatcaaagctaaatgaatcaacaacgattaaatcattatcgataaccttttgtgaaagtactgacttgattgcaagacgacgtaccttacgaggtaatttatagctgtatgaacgaggtgtaggtccgaagacaacaccaccgccacgccattgaggtgaacggattgagccttgacgagcacgaccagtacctttttgacgccaaggtttacgaccaccaccacgaacagctgatctgttcttaacagcgtgtgttccttgtcttaatgatgcacgttgcatgatgatagcatcaaatacaacattttcattaggttcgatagcccagattgagtcgtttaattcaacgttcccattttggctaccatcttgtttaaataatgttacgtttgccattggtaaaatcctcccttctcagattatttatgagctttaacggctgttttaattgtaaccattgagtttttagcgcctggtacgttacctttaacaagaataacgttcttttcaacgtctgtacttacaaccacaaggttttgaacagtacgttggttgttacccatgcgtccaggtaataatttacccttgaagacacggttgataacagcacccattgaaccaggacgacggtggtaacgagaaccgtgacccataggcccacgtgattgtccgtcttttttaatgttaccttggaaaccatgacctttcgttacaccagtaacgtcaacgacgtcgccggctgcgaaagtatcaactttgatttctgttcctacttcgtaatctcctaatgcgacatctctgaattctctaatgaagcgcttaggagtagtgtttgcttttgctacatgacctttagcaggtttgtttgacaagacttcgcgtttatcttcaaaaccgacttggatggcttcatagccgtctgtttcgtttgttttaacttgtaaaacaacgtttggagttgctgcgataactgttacgggaattaattcaccgttttcagtaaagacttgtgtcatacctacttttctacctaagattccttttgtggtcatggtaacacctcttttcaattattttttatttggataatgctaattaaagcttgatttcgatgtcaacgccactaggtaagtcaagtttcatcaatgaatcaactgtcttaggtgttgggttaacaatatcgattaaacgtttgtgagtacgcatttcaaattgttcacgtgaatccttgtgcttatgtggtgaacgtagaactgtgtataaagttctttcagttggtaatgggattggaccagagattgaagctcctgttctctttgctgtttccacaatcttatcagctgattgatctaaaatacggtgttcgaatgccttcaaacgaatacgaattttttgttttgccatgtttttccctccttcgtctattttaaaagtagactagctccgtgaaaatttttccggcacgcccgcccatggcaaagcggccgggtgtgtcgcaacctctcacatcttagctactcggggtatcttgcgacccccatgtgtgcaaacctctgctatagaaatagcaccttatatatcttacaagatagagcgcgataacgcaaccccttttttgctgatttatcaaagtttttcatgacattttcattacaaaaacgtcaacagcatgttagtagccttttccatcggttttcgttaaactaaagttaatttcaaacctcaggaggcctcttccaatggataaagctgcgttattgatcatcgactacacgaatgacttcgtcgccccagacggtgccttaacggctggtaagccggctcaagacatcgcatctaccattgtaacacttgcggaccaattcttggccaaaaaacagtttattattttaccaactgacttacatgttgcaaacgaccctttccatccagaagctaaactcttttcgcctcacaacctcgtggatagccgtggacgcgctttttatggtccactagctaattggtatgccgaacaccaagacagcccctacgtctacgcattcgccaagaatcgctactctgcgtttgcgaacactaatcttgataacttcttacgcgaacggcagattaccgatttgcatttaactggtgtctgcaccgacatttgcgtgctgcacacagccgtttcggcttataacctgaattatcccctgacgatccacaaaaaagccgtcgccaccttcacgccaaacggtcaggaatgggcgctggcacatttcaaaaacagtttaggcgcaacaatcatttagcacttttcttctataaaatataaaagccaccgccaattcaaaattggcggtggctttctttgtttgttatgtttcgaaaaaaacgctaaaaaatgttatgccagggcggtggcaatcgagttagtaggagttgaacctacatcaaccatcttattcggatcaccttaatatcgttgcgccgttttaatcgtgccttcgaaagcaattaaacacaggtctccaacttaatactaagtgagccgactcgattttcttgggaggaatttcaaatgatggttcgttctaccgattgaactataactcattggtgttgcttgcgatagctaattctttctagggagagctaccacacaaaattaacaaaatcagatgattcttgggagggatttatctgatatataaagaataacaattagttgtgaacaaaatgtgaacattcaattatgaaactgtaaaagaatgacatcgctcacaactaaaaaaccgagttgcctttgacagcaacccggtcacaaaaaacgatattaagcaattaatgcggtcaaacgaccgttctgacgaacgattcgcttattggccaccgttcttcttaatgatttcttcttggatgctcttaggaacagctgagtagtggtcaaataccattgtaaatgtcccacgaccttgtgtagctgaacgtaatgttgtcgcataaccaaacatttctgacaatggaaccattgcattaacgatttgggcattaccacgtgcttccataccttcaacagcaccacgacgagcagttacttgtcccatgatatcgccaagatattcttcaggagcaataacttcaaccttcatgataggttcaaggatttcagcgccagcttgtttagcagcgttcttcaatgccattgatgcagcgatcttaaatgctgattcattagaatcgacatcatgataactaccatcatataacttagctttaacgtcgatcaatgggtaaccagctaagacaccgtttgccattgattctttcaagccttgttcaactgatgggatgtattcacgaggaacaacaccaccgacgatagcgtcttcgaattcgaagcctttaccttcttcattaggtgtaaattcaacccaaacgtcaccatattgacctttaccaccggattgacgaacgaatttaccttgtgcagatgcttgttttgtgaatgtttcacggtaagcaacttgaggttcaccaattttggcaaccactttaaattcacgtctcatacgatcaaccatgatatccaaatgcaattcacccataccagaaataagcgtttcgcctgtttcattgttggtttcagccttgaatgtaggatcttcttcagcaagtttttgtaaagcaagatctaacttatcacgatcttcttttgattcaggttcaacagaaacttggataactgggtcagggaattccattgattccaagattaatggatgatcaacgtcagtcaatgaatcaccagttgttgtattcttcaaaccgattgcagcagcgatatccccagagaatacttcaggaatttcgttacggtgatttgaatgcatttgtaataaacgaccaacacgttcacgtttgtctttagttgcattcaagatgtatgaaccagattgtaatgtaccagtataaacacggaagaatgttaaacgaccaacgaatgggtcagtagcaatcttaaatgctaaaccagcaaatggtttgtcatcgccagccatcaattcaacttctgaatcgtcttctgggtttttagcgttataagggcgtacgtctaatggtgatggtaggtaatctacaacaccatccattaacatttgaacacccttgtttttgaaagctgaaccagcgaaaactgggaagaatttcaaatcgatagttgcttgacggatagcagctttcaattcttctttagaaatttcttcgccttctaagtatttgtccataatgtcgtcattaacatcagcaacagcttcaactaattcggcacgacgttttgtagcttgttctaggtagtcagcaggtacgtcaactgtatcccacttagcgcctaattcatcttcgtcatagatatcagcttgcatttcgatcaaatcaataacgccttggaattcatcttcagcgccaattggcatttgaacggcatgtgcgttagcttgtaggcgatcttccaatgttgtcattgaataatcaaagttagcgccaagtttgtccatcttattaacgaaaacaatacgaggtacaccataagtagtagcttgacgccaaacattttcagtttgaggttcaacccctgattgagcatctaagacagtgatagcaccatctaaaacacgcaatgaacgttcaacttcgattgtgaaatcaacgtgacctggtgtatcaatgatatttactcgattacctttccattcagcagttgtagcagctgatgtgattgtaatcccacgttcttgttcttgttccatccaatccatttgtgaagcaccttcatgtgtttcaccaatcttatggattttaccagtatagtacaagatacgttctgtagtagttgttttaccagcatcaatatgtgccatgataccaatattacgcgttttgtctaacggaaattcacgtttgtttgccataagtgaatgttactcctctcgaatattaacctaaagacaacaagaggccattatatgattttttaaaaaacatacaatagccaaccttgataatcttaccagcgataatgtgcaaatgcgcggttggcatcagccattttatgtgtatcttcacgtttcttaacagcagcaccagtgttgttggcagcatccatgatttcacgtgcaagacgttgatccatagtatgttccccacgtaggcgagcgtagcttactaaccagcgtaaacctaaagttgtacgacgttctggacgaacttcaattggcacttggtagttagaaccaccgatacggcgagctttaacttcaagtactggcatgatgttgttcatagcttcttcgaacacttctaatggttcattaccagtttcttctttaataatatcaaatgcgtcatataagattgttgacgctgtaccacgtttaccatcaatcattaagcggttgattaagcgtgaaaccaatttagaattgtacattggatcaggtaaaacgtcacgttttgcaacatagccttttcttggcatcctgataacctcctcaagatatttaagtccttgaagtaacacacagtgtcatttaaacttcaatcgactttttcaaatttttttgtgtgttattttttaggtctcttagtaccatatttagaacggctttgcatacgaccgtcaacgccggctgtatctaaagcaccacgaataacgtgataacgaaccccaggtaaatccttaacacggcccccacggataagaacaacactatgttcttgtaggttatgaccaataccaggaatataagctgtgacttcgattaagttagataagcgcacacgagcatacttacgtaaagcagagttaggctttttaggtgtcatagtaccgacacgagtagcgaccccacgtttttgtggtgctggattatctgtagcttttttcttcatactattgtagccaaagtttaatgcaggtgcatcagactttgaagttcttgatttacgacccttacgtaccaattggttaattgttggcatttgaaggttcctccttccttgatctgaaagttatttttaagttttaagtccacacatccaggtggttctttttttgtgataaaaaaatggcaacctagattgcgcgaattgtgatgcatttttagacgtcagtcagcatgtctgttatccagaaaacctccgtaaaaagcacatctataagaatagcatgcaaaaaatcgaaagtcaactcgatttcggctacttttctgaaaaaagcaacgtcattttaccgtagtttaagagtaaggaggattcacttatgttactttatttaatcatcttttatagcggtgcttgttgcgcctcatttctaaccgtttgtgcctggcgcttacccatcgaaaagtccattatcacaccacgttcgcactgcgattgctgtcagcagtcactggcttggtatgatttattaccactattcagctacttatacttacgtggccactgccgcacttgtcatgctcagattaagcccacttttttattcagcgaactaattggtggtctattggcctgcttcatttttagcgaatccctttcttgggacctcgcttatttactcgtgattcttttttacatcagtctcgttgacctcttctactatattctctatccaatccccttattcgcatcactggtgcccctcttttatttgtattggccacagaatcattggctgggggcgattattatttgtagtggcttattaggcctcaattactacttagacggactcgggctaggtgatgtcgaactcctaacgatattggggctctggttcggcctagcccctctcttacagatactactaaccagttgtttatgttgccttttttactacgccttacggcaattccgtcaagccaatattcgcaagctaccaataccattcatcccttttattagcctcggttttctgattactggttggttaaactaaaaaaagcccaccgccaaaggttattggcagtggacttaatttttaatctaagtctctaatataatccagcatatcgctttcgttataatcagtaaatgcatttacggaatctttcttttcgcccgttaaatcactgtatttatagaacgttaatgtgccgtcgtcttccagcttccaataggccatcacgtcaccatctgatgtatccgtaatcttaccatcagcatagtcactctcagtttccgtggttgtcgtcctacgcgtgccatgccaactgtacatttcactataaacatatagcgcgatattctgtggcgtcaagtcactattgtaactctctaaatcgtctaagtctctgacatcacttaaactttgaatatcagattgacgtgaataggcttcaaatccctcttccgcgtcagcacgcttgtctaactcactatctagatcgtcagtcaggcttttacgattgtccgtattcgtcactttcttgatttcacttttaatcttggccgtcttactatcaatcgtcccattatcgtaattcgtttgtgaaatcagatcatagatttggctgtgtaacgagtcaattcgtttaatgtccgccttagtgtccgctaatagttgggtgaccgtcgttttaaattggtcgtcgggcaattttttagcttccttttgcgcggtattaacttggtcaattgaagtatacaccgaaatcccgacgtcctttttaaccgttgacccaactagtttactctgagtatacaggttattaacggtccctagcattttatatttctgctcagtttgactctgcaattttgcggccttttgttgactacgaccaagtttaagccgaattctctcagaatctaaatttgtaatatcattgtttgtaactttggcaccgaggtattcatgcttcttagttgtgtaaagtgcatcgtattgttttaacacagtacgatcattttgatatttctgataatatggcaccccaaacaacaacactaagattagtattccccacagatacttcttattcttagcggcccagtttccagctggtttggcttgtgttcttgtttgaagtggtggtacttgttgttgattcatttcagacaacggttggaccgtcaatgcattcccacattgaatacaaaactttgatccttgtttattctgtgtatgacaatttggacagatcatatttattcacccttactttttttcattaaaatgcttcccctaaagcgatttaacaggcgattcccacctcgttaaatatcttttatatagatcaatttaatcgatttatggaacatcgatgtttcgtagcccaactgagatttattaacagtaaagagctgcccttcatcttttagtaataaacttaacctaccaattgttgtattaatatatggtgtatattcctggattttttttattttattaacattctgagccgttaagcggtaatgccgcttatctactttagtaatatagtcatcattacgaatttcattaaattcatcaacaccatccatcaccgtgatcttaatcttttccggattgataattctgtattgtaaattcactttttttaatttaatacctgttaattgcgcttcttttacatcataattcaatacggtgtatactgcgtttccttggttgtcaatcgtcagcaaatcattaaaatcacccctggatccacctttgtcaacccgttttccattagcggtgatcagtctccaatcaccggcaatctcatgcgtactattcttcaagaaccagagataaccaccaccacaaacaagcgcaataagtataatagcggttgaaagacgcttcttatcacccaaaatgcgcgttataaaattaccagtcacattattgctagctctatcgatttggtttgcttgcgggatttccatttctgtaattggtcggatttctaacgccgcaccacacttcacacagaacttcgcacccagtttattttccgctttacaacttggacaaatcatttctatcccacctaaacttattttaattcccctaaaaaaatctggttaccatctacggtgaccagatttttaatttgtaatttattcaataaccctataaaggtactaactaatagccaaagctattaaaaagagaatctaagctcttagggtccttaaggtattctaatataccatcagaagaggcaaacgcttgtgatattccagcaaaggcaatctttatagcagttaattcagatggtttaagatattgactcaaaattcccataaacgttttttcaattacaaaacctgttaaaacccatacgataaatatagaaataattagcccaagtagcactacgtagagtttgtcaaatttgtaagtaatattagtttgtaaaattgattgaacaaaactaattgtaagaatgactaattgtaatccgaagagaagtaacgctattcttattgaactcgtgctataagacatcattaccacacagccaataattgctaaaattaatgatgataccgcataatgcataaaatcattcgtatagactaaaaagttttctttaacatccccgaaaatataacgtaacccaaaaccaatcacactaaaaactaaaataataccaatgaacaaaccgaaaaccaaaaacaaattaattgatggtgattctgttttgagcgcgccgtcactaagtgaatacagtgcttttcccataccagatacaaatagcttaatagtaatcgtgttaatgattgctaaaatgatggccgtaatcaatccataaacttgagtactgtcactctgcttccctggatatttaatagcatccacgaaatattcccaataacccgctaaacctttttctgctactgattttttagcagcattcatattcatggcacccatcggcttagttgtcgcctgttgtggttgtaccgggctaaccggcgttggttttactggacttgttggtgctgatgtgggtgttgttaccgcaacggccttcccacagcttggacaaaacttagcacctgtttttaattgacttccacagtttggacatttcatattcttttccccctaaaaatatcaaacctaatttttttattattgctgttgcctaatccactctataaaacgcgagttctttataattatgcgtcccgcttgttggtaacatatctttagtcttatctggtcccttaaagttataaccgactaatagataatcatccgtttgccccattactttgtacgtgtaatcttcggcgttcgcattatatgttttcgcaatcgtccgtaagttcttttgcgttttactatcaagtttatctaagctcttaacattagaagctctttgttctgttactttttctgctaattggttggctgcttgttgttgactgtaaacgtaccaaccagcaccggcagcaatcaatacaataaccgcaacgacggacataatcattttgtttttcttttgcgttacttggttttgagctgcttcgttagcttgcaaaatctgttgcttgttctgatattcccgcaacttaatttgcgtttctttgtaactcccaaattgttctagatattgcatggcttgttggagatcaataaccgtttcggcggcttcagcagctgcaattcctgattgataggcagcatcgtagtcttgttcatgttgttgcgctttagcttcttggattaattgcaatttttgaggtgcatcccggtaatcacctaaccgcgtgaataacatttcagctgtttctaaatcgccttggccaaatgatgcaatggcttgatcgtaatcattagtttgttgttgtgcttggaattccgcttgtgctttttcaactagcgtaattttctcacgtgaatcttggtaatcgtctaataatttaaacgcggtgatagctgcttcaaagcgaccttcactaaagtccgtaatggccttgtcataagccacttgtttaggatcaagtggttttgcgccttctaactttgtaccacaactttcacagaaaccatttgtaatcggatttcgtgtcccacattctggacagaaaatactttcttcagacatgttatttccccctatttctcaactaagtcaacgtcggttgtttttaagtcgccatctttgctgacatagtctactgttacggaatccccgtcagaataatgcgtcataatcttagtgatatccgtcgtatcgccaacgtagtaaccatcaatccgacaaatgatatcgccagtttctaaatcactacccgcagctgaaccatctgagtagatatcagtaatcttaagaccaatttccttattgttgttcttttgtcccatattataaccacttacaccaaagtaaatatccgtatcagtatctgaaccgggatcttttagttctggataagtttctgaagctgcctttttctgagtcatcgtcaactcgacatccttcgttgaaccatccttgaaaccaacttcgacttttttacccaatttaataccttgtaaaatactttgaatactattatccccaataacagctgaggcaaccttcttaccgtcaatcgaagtaataacactactgtcagaccaatcgctatcagttgcgaagtttgcattgtcagcagggccacctgttaataatgccattggaataaccccaataccgttagctaaatccccacgtaacatccctaatgaagggtatgtttcgttcttaacagcatcttgtaatgcactagcatcttttttcttttcttcagctgctttcttttgtgcttctgtcttagcttggatgaacgttgttgcttctccagagagtgattgtaatccggcaacggataagttcaacccgacaacatcattccggtctgagaagcctttagcaagttctgttagcttttcagccgcttgtgtactagatttagggaaattcttgtcatttttaagatctgctaacttcttagacactttttccatttccgctttttgctttggtgattgcttatcagtttcagccgtaatttccttttgcgccttttcagttaagccttttaaatcttcacccttaacgttcttccggatgattgctaagttagtcttttcacctggttgagccaataattgttttaacttagtcgcacttttaccagttgctagcgggttaaaaagaactaatttttgagctgtttctatctgttgatttgtcgcttgaacttgttgattgtgccagataaagccaccagcaacagccacaatgacaatcacgccaccactaagtaaccatttactcttattgttctttgactttggtttattatttgtatccattctagtttcctccctcagttttatccccattaagatgctgcaatcacgtttgtgacagcttgtccaatgttgccgattgcgttcacttcactttgcgtttgttcaattgtcgcatcgattggtgtttcaccttcgccatccatttcaattaggacacacattgcaaagacgtggccgttatatttaatcaaggccatatcattttcaattccccggtaattagattccccactcttgttgtaacaaatggcacctgcaggtaattgtgatggtaatttcgttctattcttagtcttcaacatcaaactaagcatttgggcatcggttgttggatcaataaccttcccttggtataactgcaataaggtttgggctgcttcttttgcgttaatccgattagcgcgcccattttcgatgttgctggtatccatcatcttccgttctaggcttgattgatgttttggccctacaacgctcgtaatggtgcggttaaccgctgaaaagccgccaacttcatcaattaagacgttcgtggcgatattatcactttgttcaatcattaaattgcacagctcttgtaatgtatatttagtccccaccggatcgtttagcatagtgccagaaccttgtaccatatcttttttctgaagcacataggtatcatctggatttaattgacccgactgacataattgataatagcgtattaaaataaagagcttaatggttgaagccgagaattgtgacttagccggttcccaattggtaaccgacgttttcaaaccctgtccaccaacttcttcaacataggctgtccagcgtgctgggccgtgagttgatggcaagaccgtggccatctgagtcgtaatcgcctgcgacaatgcctcattattatttttttcaagcgcaattacttgcttagaagcttgtttatgacgattaactttttcagattgtgatgattcactcaatttgctacttgtgtgtttcttggttgtaacaacctttttaacaggttgatgcttctgtgactcatgcgattccgaactaacgtgttcgctagatttaacatttgatgcttggtttttaaaaacaaaaaacaggcctaggataattacgattcctacgccaacaatgcttagattcttcttcatttaaccctacccctaaactttatcatccatcttctccaaataattatcatttaatccccgattattaaataaaactatccccccagcaagtagtggtaccctttaactgtccatagagttacctttttgaagactactagtattctatcataaaaaatgcgcttgtgccttttgtcccaagatatgtctgatatcctaatccgaatttaattatctatccattagattttaaaaaatgatgaactgtttttttaaatcaaaagcggtttcacttagctgtagactggtcttaaagatcactaaaaaaaccgatattgggctttagcaccaatatcggttttctcattttatttaattgcctgtcatcctaaaaaggtcgtcgtagacatcacttgccccattctcgggaaaatatattgtaagctgtgttggtgttcaatcgccgtgctggcggtcattgcatcttcaatgaagatttggtgatagttatgttcaaacgcatcacgcgccgttgattccacgccaatattggtggaaatcccacataagacgatggtttcaatccctcttctgcgtaattgaaggtctaagtcggtgccatagaaggctccccattggcgttttgtaatttgatgcgcatttttgtagttcgcaatttctgctaataaacgtgtgttcaatagcggtgatggttggcgatagtcaggtgtccgttcccctaaattaggcgttagttgatcttgtccgtctgtgacgccaacatttacgaggacaacaaaaccttggtgcgcttcaaagtcttcgattagttgtcgggcgttttgaacgaccgtttcacccgcatgaggtgcgagtgttgggcgatccgcaatgccacgttgtaaatcaattaccactagggctgttttggcataatcaatggttgtcatctgaaagctccttttaatttggtagacaaaaagaggccccgagggacctctttttaacgtgcatttaaaggcatattcctgtgcctagcgctgtccgtcgaataagcgactgtgtcgcttattcaccagactatgctagtgctcggaatataatcgcctttaattgcacttctttattcttttgtttcttcttgtttcatttgtgcttcaatgtcactgattgagtaaacattttctgatacagcaccgactgtcttaggttccatatgacgatacttcgccataccagtaccagctgggacaatcttaccaatgataacattttctttcaaaccaagtaatggatcgctcttaccgcggatagaagcatccgttaagacacgagttgtttcttggaatgatgcggctgataagaaactatttgtttccaatgatgctttagtaataccaagcaagacaggacgacaagtagcaggtacgccaccgctaattaaggtatcgtggttacggtctgtaaattcactaatatccattaatgtaccaggtaagatttctgtatcacctgggtccatgacacggactttacgtaacatttgacggaccataacttcaacgtgtttatcgccgatttcaataccttgcatacgataaaccttttgtacttcatgcaagaggtagttttcagttgataatacatcacggactttaattaattgcttaggatcgacagacccaccagtaattttttcaccacgatgaatcatgtcgccttcactaacaatgatgtttgacgtataaggcacgctgtatgaacgtgtatcagtttcgccttgaaccgtaatttcacgtgtgtgttctgctgggttttcttcaacagcaatcacttcacccgttacttcagtgatagtagcgatagctttaggattacgtgcttcaaaaatttcttggatacgaggcaacccttgagtgatatcttcaccaccagcaaccccaccagtatggaagttacgcattgttaattgcgtaccaggttcaccgattgattgagcagcaactgtaccaactgcttcgccaacttcaacttcttcgccgttagccatgttacgaccgtaacatttcttgcagacaccatgttttgtattacatgtgaagacggaacgaattgtcacttcttcaacaccagcatcaacaacagcttgagcaagttgttcatccatcaattggttcttagcaaccattacttcacccgttgttgggttaataatcgtcttcattggacaacgcccaacaagacggtcatacaatggttcgatcatttcattaccttcacggagtgagtgaataagaagaccacgatcagtaccacaatcttcttcacgaatgataacatcttgtgcaacatcaactaaacgacgtgttaagtaaccagaatcggcagtcttaagagccgtatcagtcatacctttacgggcaccatgggtagacataaacatttccataacagagagaccttcacggaagtttgatgtaacaggaacttccatcatcccaccattaggagcggccatcaagccacgcataccagcaagttgcgtaaagttagagatattaccacgggcaccagaatcagacatcattgagattgggttcgttggatcaaatgaatccgttaaacgttgttggatatcatctttagcatcgttccaaatttcaataacacgcgcatgacgttcttcatctgtgatcaaaccgcgacggaattgtttagaaatcgttgtaactttcttatgagcgtcatcaacaatttcttgtttttcaggtaattgaggaacatcggcaaccccaactgttaaaccagcatgagtcgcttggacgtaacctaaggtcttcatgtcatccaataaatcagatgtccgttgaaccttatataccttgaagacttgcgcaatgatatcacttaagaaacctttcttaaatggtaagattacgggtgcaccagccaagtaatcatggatatcttcaccgttgtcgatgaaatacttgtcaggaacaccattcattaagttatctgttgttggttcatttaaatatgggaagtcagctggcatgatttcgttgaacatcactttaccaacactcgttaccataatcttgtgacgttgatcatctgtaaatggacggttagccatatcagcaactgataaaccaatccgactgtgcaaatgaacgtggccagtttgataagccatcaagacttcgtttgtatctttgaagatcatgccttcgccgagacgattcttttgttcaagggttaagtagtagttccctaaaacaacatcttgagatggtgtaacgattggcttaccatctttaggtgccaagatatgatgagcggcaagcattaacattcttgcttctgcttgtgcttcgtcagataaaggtacgtggatagccatttggtccccatcaaaatcggcattgtaagcttcacaagctaatgggtgaagacggattgatttaccgtcaaccaagattggttcgaaggcttgaataccaagtctatgcaatgtaggtgctcggttcaatagaactgggcgttccttgatcacatcttctaaaacgtcccaaacatcgtcgtcttgacgatcaattttacgtttagcgttcttgatatttgaagccatatcgcgtttaaccaattcgtgcataacgaatggtttgaacaattcaagtgccatttcacgtggtaatccacattgatagaacttcaatgtagggccaacatcgataactgaacgaccagaataatcgacacgtttaccaagtaagttttgacggaaacgaccttgtttccctttcaacatgtgtgaaagtgacttcaatggacggttaccaggtccagtaactggacggccacgacgaccattatcaatcaaagcatcaacggcttcttgaagcatccgtttttcgttttgaacgatgatgtttggtgccattaagtctaacaagcgtttcaaacggttgttacggttaataacccgacgatacaaatcattcaaatcagaagttgcaaaacggccaccttcaagttgaaccatcggacgtaaatccggtggaataactggaatagcatccattaccatccagtcaggacggttacctgacttacggaaggcatctaagatgtctaaacgacggatagcacgtgttctcttttggccttgagctgacttcaagttttccttcaattcagcgacttcgccttcaagatcaacgtcttgtaacaattctttaatggcttcagcacccattttggcgttgaatttgttgccatattcatctaatttttcacggtattcgcgttctgtcatcaattgtttcttttcaagtgctgtatcacctgggtcgataacaacgtatgatgcgaagtaaataacttcttccaaagcacgagggctcatgtctaagacaagacccattcgactaggaatacccttgaaataccagatatgtgtaacaggcgctgctaattcaatgtgacccatgcgttcgcgacgaacttttgaacgtgtaacttcaacgccacaacggtcacagacgattcctttataacgaatccgtttgtacttaccacaagcacattcccaatcttttgtagggccaaagattctttcatcaaaaaggccatcgcgttcaggttttaaggtacggtaattgattgtttctggctttttaacttcaccatatgaccaactacggattttgtctgaagatgctaaaccaatttgcatgctttcaaacttattgacatctatcaaagggcgacctcctcattatttgtaagatagtcaagtgttttacgcactctactaatccgatatcaaacgcttattctgctgatggatcttctgcacttgctgcttgtgctttttcagcttcttgttgcgctttcttttcttcttgttcttttgcgtatttagataaggcatcaacgttaacaacatcgtcatcatcgtcatccatatcgcgcaattcaatttcttgattatcgatatctaagactttcatgtctaaaccaagtgattgtaattctttaaccaatactcggaatgattccggtacaccaggttttggaattggttcacccttaacgattgcttcgtatgtcttcacacgaccaacaacgtcatcagacttgtaagttaagatttcttgtaaggtataagcggcaccgtaagcttcaagggcccaaacttccatttcaccgaaacgttggccaccaaattgtgctttaccacccaatggttgttgcgtaacaagtgagtatggtccgattgaacgggcatgaagtttatcgtcaaccatgtgggctagtttcatgtagtacatgacaccaactgacacacgtgtatcgaatggttcaccggtccgaccatcataaagaatgctcttaccatcagaaggcatgtttgcttcacgaacagcagcccataaatctttatcttgcgcaccatcaaagacaggtgttgcaacatggatacctaagtttctagcagccatcccaagatgtaattcaagcacttgtccgatattcatacgagaaggcacacccatgggactcaataagatatccactggggtaccatctggcatgtatggcatatcttcttcaggaacaacgattgaaacagtccctttgttaccatgacgtccagccatcttatcgccgacttggatcttacgtttttgtgtaatgtaaacacgaaccatcatgttaacacctggtgataattcatcgccagcttcacgcgtaaagatcttaacgtcttggataataccgccgccaccatgaggtactttcaatgatgtatcgcgaacttcgcgggctttttcaccgaagatagcatgcaatagacgttcttcagctgataattctgtcacacccttaggcgttaccttaccaactaaaatgtcgccatctttaacttctgcaccaacacggacaatcccgaattcgtcaagatccttcaatgaatcttcaccaacgttaggaatttcacgtgtgatttcttcaggtccaagttttgtatcacgtgcttctgattcgtattcttcaatatgaattgatgtatacaaatcttctttaactaagcgttctgaaagaacgatagcatcttcgtagttatacatattccaagtcatgaaagcgatcaatgggttttgacctaaggctaattcgcctttttccatagctggtccatcagcgataatttcatcaacatcaacgtgatcgccttttgcaacgattgggcgttggttgtagtttttaccagcatttgaacgacggaatttcattaattcgtacgtatctaatgagctgtcttcacgacgaacacgaatagctttcgcatcgacatattcaacagttccggcatgttgtgctaataaagcaatccctgaatcgtgggctgctttgtattccatcccagtcccaacaagtggtgcatgtgggttaaccaaaggaacagcttgacgttgcatgttagcacccatcaaggcacggtttgaatcatcgttttccaagaaaggaatgcaggccgtagcgacagcaactacttgcttaggcgaaacgtccatgtaatctaacttgtcgattgatgtttcgatattgtcatccttgtaacgggccaagaccgtgttatcaacgaatgaaccatcatcgtttaatggtgagttggcttgcgcaatgacatagttatcttcttcgtcggctgttaaatagtcgatcttatcagtaacatcatgtgtatcccaactaacacgacgatatggtgtttcaatgaagccataacggttaacaacagcgtagctagctaaactattgatcaaaccgatattagggccttcaggtgtttcgattgggcacatacgaccataatgcgtatagtgaacatctcgaacttcataaccggcacggtcacgagtcaaaccaccaggtcctaaggcagatagacgacgtttatgcgtcaattcgccaagtgggttggtttgatccatgaattgtgacaattgtgatgaaccgaagaattccttgattgaagcaacaactggacggatattgatcaattgttgtggtgttacggtgcttgtgtcttggattgacatccgttcacgaaccacacgttccatccgtgataaaccgatccggaattggttttgtaataattcaccaactgaacggatacgacggttacctaaatgatcaatatcatccgttgaacctaaaccttcttgtaagttaaagaagtagttcattgaagcgatgatatcagcaggaatcacatgtttcactttggcatcgatatgaccattaccaattaagttaatttctttatcaggtgtcttttgtgagtaaactttaatgacttggagtgtcattggttcaggcaagacgccttcatcagaaggttggtaagtaacagctttgaagtcttcttgatccaaataaggtgccaaggcatccatcacttgacgatcaacaagtgtatctttagcagcaattacttcgcctgtgtcaggatcagccaatgtttcagccaatgtttgacccaataaacgtgtcttcaagcttaatttcttattgatcttgtaacgaccaacagaagctaaatcgtaacgtttagcatcgaagaaacgggcaaaaagtaatgaacgtgagctatcagctgtcttaggttcgcctgggcgaagtctttcatagacatctttcaaagcttcttccgttcttgagtcgtcagtattcttatggatatctttttctaacgtcaacattaatgaatcgttgtcgcccaagatatcgataatttcttgatcagacccgtaacctaaagcacgtactaaaacagacattggaatcttacgtgtccgatcaatacgaacgtatgcaatatccttagcatctgtttcaaattctaaccaagcaccccggttagggatgacagttgtgccgtaagttgtccggctatttttatcaatagcactgttgaaataaacaccaggtgaacgtactaattgagaaacgataacacgttctgcaccattaataatgaaagtcccttggtctgtcatcaatgggaagtccccaaagaagacgtcttgagatttaatttcaccagtttcatggtttgttaatttcaaagtaacgtgtaatggtgctgaatagttggcatcatgttgtcttgcttcttcgaccgtatatttaggttcaagaagttgataatcaacgaattctaatgataagttaccagcaaaatcgtcgattggcatgatgtcatcaaacatttcacgaagcccttcgtctaaaaaccattgataggaattagattggatttcgatcaagtttggtagttccaacacttctttaatccgtgcatagcttctacgtgtccgatgtttaccgtaattgactaagtgtcctgccaaattgttcacccctctataagttttccgcagtacttaatgttacaaaaatgtgacaaagattaagaaaagattacattgccatattttcgactttttaagcagaaaaaaaacaaaaatagttgatttgcttgattaaaatcagcctcactatttttgttttccatgaataccgtgctggacaatagatcagcacaataaatttttctacggattttcgcagttatttgataatataccttatttcctataaaaagtcaatcactgacgctcgtcgaaataggccaatgctttgcccccataaaccgtaccaggaccacccgacatcataactgctgtgttgatcgtttcgatcacttcatcccgactaacgccttctttaatgaggcgattcatatgactgagtatgcagccttcacaccgagtcgcaatcgcaatccccaatgcaatcaattctttttccttcaccgttaaggcaccatctttgacgttagccttgtgcaagtcaccaaacgcccccatcacttcgggcgacgcttctttgagtgccgcgtattccttcttaccggtttgtgcctgttctgaataagtcatctgaatacctccttgttttaataactctactataacaaagaaatcgttttcagcagtctgatatgcttaataaaaaagccccctatgatatgaaccacagtgttacgcgttcatttcatacaaggacctttttatttatcgtacacaaacttattattatagaatttagaagttgccgaaagttcatcattaaccttttttaacccatctcgttcaactaatgttttctcactcgataataggttagtccccaacgccaagcgatttcctttaatttgaacacccattgcagctaacgtcgttgggaacatgtcagttgttccaaattggcgattcttagtctttacattagcagtcactgctgtaggtgcattcaagattaaattaaacgtatgccgcttattcgattgaatcgctttataataatcaacatccattcctaagtgatctccgtcgacaataatcgttgtattctcataaaagggttgctcttgagcccatctaataaactcagcgatttgatgatccgaaaaagcaataacatttgaatattgattagcgtattttttcggcatatctgtttcagcatatccaccaatatgatgtgtattagctgtcaacatcgtcaaattaaacggtttagaggattgactcaatttagtagcgctctcctttgcatattcgaaaagtttggaatcttcatatccccaccatttataataatcctttgataaccgaccatctttacgcgctgttaataaatcattaatctttacaccaccatgttccgtaaagaacgtacgccgaccaccaaacgttgcatcagagccaaataaagccatttgattgtacccatttttagctaatatgtcagttagcgttgttgccccaggtaaaaattcggcacctttttcttttccatatgagttaccatcaattggcaccttaagaggtagcccagcagtttgggcaaccatcccagcaattgtccaacctgtacctgctagttgttgtgcgccaccaaattcctgacctgaatcggaaaaatgaatcccctgtttagagagttctgttaattctggtaataaattttcagccatctgtccacccattgctttagacgtagcggttgactccagtgactcacaataaatgtagataatattgcgtttcttttttgggaattccaaccgactctcagttggtgctacataatttgtttcaatatattttgaattcgaagttaaatactggtaaaatcctgcagcatctattttaacagcagccatcattgtcatacccccgaaaacaacaatactcatcagaattaaccatcccgatttccactgccaactgtgtatttgccgtttatctgcaatcttaagtttaaatcgtcgcatgtacactaatagaattcctgataaaatcaaaacactacttgcaccaacaacaggacccattatgaacgactttatgaaactaccatccacaccatccatcggttgcattaaattatagataatctgttctggtgttagtagattgaagttcgcttttgtccaccggctagcagaaacaaaaaagtagcctaatgctaatataaaggcactaaacaatcttgcgtaaggaatgccctttaatttcttatcagtagtcactatatctagcgctaaataacgccgaatcatctttcttatagccaaaatagcgatttgcacaatcgtcactatcgcaataaatttaagaacaaatatcggctgaaaaacaacgtcattaaacgtcaagatattccccgtgacaaccttgataataccaactgttaatgtaagaacaacaattaagtttataagcactttcatctggttaacaaagccctgatcatcacgcctaacaattgctgccaatattggtaaagctacaaataagtataaagatgccataaataacattcaacttgctccatttcattactttgattcaaaaactacattctttgttattctactgcaaatttattcaacttactaattaatattaatactctcaaactatattttttacaatttcatcacactacttttaccatctttacagtaattacgggtcaatctttacactggctcgctatacttttgtttgtaccttaattcaggctgggaggcttaattatgaagagaataagaacagtattactatcgatcggcactatcgccctcttattagcgggttgtcaaggcaaacaagcaagtcaaggtgattctaaagcacagtcggctaaaatcacagcggttggatcaacggcactgcaaccccttgttgaacaagctggggcaacttatcaaacaaaacacgctggcatcgatatcactgttcaaggtggcggttccgggaccggccttgcacaagtcagcgatggtagtgtcacaatcggtaactctgacatctttgcggaagaaaaagccggtatcaacgctaagaaacttgttgatcacaaggtcgcagtcgtcgcaattgcccccgtcgtgaacgaaaaactcggtatcaaatcattaacacaggcacaactaaaagacatcttcactggtaaaattaagaactggcacgcagttggcggccctgaccaatcaattaccgtcgttaaccgcgcacaaggtagcggcacacgccaaactttcgaaaatctcggtcttaaaacgaataaagtcatgaccagccaagaacaagactcatctggtactgttcaaaaaatcgtgcgtcaaacacctggggccattagttaccttgcctttccttatattaaggatggtttgaaagctgtcgcacttgataacgttcaaccaaccactaaaaacgtcctcacgaaccaatggcctatctggtcttacgaacacgcttatacaaagggtgcgcctaattaccaaacggctaaatttatccattaccttcaatctaaagacgttcaaaaaacacttgtgccaaaactcggttacattccaatgactcagatgaaagtggaacgacatgctgatggtagcatccaagacgttaaataacgcttctaaaaagacggctaatcttagccgtctttttatattggtatagacaaaaatattaagctaaataataaacttaacattcaatcgtaaaattggtataatttaaactatcagtttatggaggagtcttattcatgataaacaataaaatgaaaacgctatccgataaatacccaacaaaaatggccgtcacttctgaaatcatcaatctcaaggccatcttaaacttgcctaaaccgaccgaggcctttatgagcgacctccacggtgaatacgatgccttccagcatcttattcggaccggcgctggtaacttacgccaaaaaatcaatgaactcttctctggtgagatgacccccgagacgatgcaggccttcgcttttctcgtctactatccaactgaacgattggcgctcaaacaccaggccctctcagagaatgaattaaatcagtggtacctgacgacttttaaacggatgattgacctgcttaaattcgtttcaacaaaatacacacgttctaaagtccgtaaagcgatggcccccgacttcgtctacattaccgaagaattaatgtacggcgatgtcgccaacgttgataaaaagcgttacttccaagaaattaccgcgaccattattgaattaggccaagccgacgcgttaattatcgccacaagtcacacaattcagcgcctcgttgttgaccaatggcacatcatcggtgatatttacgaccggggccctcatcccgatttgattgttgaccagttaacccaattgcctgcggtcgatgtccaatgggggaatcacgatattttatggttcggtgcagccagtggttctgaactctgtttactaaacttattgcgaatttgtgcccgttataataacctcgcaatcattgaagaaacctacgggattgatttaagcaacttggtccgttttgcggcccaacactatcaggccaatcccgccttcatgccggttgaagatcccaaccaaggcccgctgacacgtgcggaaaaactaaaaattagccaggtccaacaagctttggctatcatgcaattcaaactcgagttaacggtgattaaacgccatcccgaattcaacatggatcaccggctcctattgtcgcaagtcgattttaaacgccgcatcttgcacctcaacggacaggaatacccactagaaaacacctgtttccaactggttgatcccgagaaccccgaagctttaacggcggaagaaagccaaatcatcgcggatttactggccgccttcacgcgctgtcagaagttacgcaaacacctgacctttttaattgatcacggtagtatgtaccgcatttacaatcaaaacttactcttccacggctgcttgcccgtcgatgctgaagggcacttcctgacattgaccctcgctaatcaacactatgccggcaaacagttactcgatttcttcgatcagcaaattcgctcgagtttcaaccaccccttacaccaagcaaacctctcgacggatttattgtggtatctatggacggggccgttgtcaccactctttggtaaaaacgcgatgacgacctttgaacgttacttctgcccagatcccgaaacccacgttgaaactaagaacgcctattacagtttgcgtcacgacgctgattttattcagcagctccttagcgaattcaacctttctcctgaaaccggccatatcctaaacggccacacgccagttaaaaaaggccacgaccccattatggccaaccgccaaatgattgtgatcgatggtggcttttcaaaagcttaccaccacacaactggtatcggtggctttaccttactctataattcttacgggatgcagctggtgacccaccaacccttcaccaccaaggcggatgcgattgctaatatgaaagacatcatctcaacacggcgagtcatcgaccaagttagccaacgccaacgagtgagtcaaaccaatatcggcgcagccatcaaaaccgaaatcgaacaactccaaacattactaacgattcaaccggatcattaataacactaaaaaaacgccccgacaaaatcaatttgtctgggcgctttttaatgttgctggtactcacttttatttaacagttgttttttcttttttactattaatggtaatttcacctttggtagccccaattgtcactggtgtatcagtcgtgatttcaccagccaataaggcttcactcaagcgatcttcaacttgcgtttgtaatgcacggcgaattgggcgcgcaccgtattctggatcaaagccggctttagccacaacatccatcgctgcagcagtcatcttgatcttgacaccttgttccgctaagcggtttaagatgcctttggacataatcttgacgatttcacgcaattcaggttgtgttaatgaatggaagaccaccgtttcgtcgattcggtttaagaattctgggcggaatgacttcttcaattcttccaaaatccgaccttgcattgctttgtaatcggcagtgacatctttgaccccaaaaccaactgacttgtcatcacgtaaggctgttgcccctaagttagacgtcatgatcatgattgtattccggaaatcaactttccgacccttagaatctgtcaaataaccatcatctaagacttgtaacaggatattgaagacgtctggatgagccttttcaacttcatcaaaaagaacaacggaataaggtttattgcggactttttcagttaattggccaccttcgtcataaccgacgtaaccaggtgctgccccgactaaacgactcgtactgtaacgttccatgtattctgacatatcaacccgaatcaagttgtcttcagacccaaacatggcttctgccaatgctttggccaattcggtcttcccaaccccagtagggcctaagaacataaatgaaccgattgggcgcttaggatccttcaaaccactgcgggcccgacgaattgcacgggccacagctgaaatcgcttcttcttggccaacaacgcgttcatgcaagactttttcaagttgcaacaagcgttcgctttctttacgttgcaattgagtgactggcacacccgtccattgggcaacgacttgtgcgatatcttctggttggacttgaatatctgtccggacaccattttcttgttcggctgcttggcgcttagccattttagccttagcaataatttctttttcgtgaatggcagcggctttttcaaagtcttgtgcaccaactgcgacttctttttctttcgccaacgattgcaattcagtttctaagcgatcgattggtgatttttggttaacagcatctaatctgacctttgcagccgcctcatccatcaaatcaattgccttatcaggtaagaaacggtttgtgatataacggttcgctaaaataacggcttcgtgtaatgcttcatcagaaattgtgatgccgtgatgttcttcataacgtggtcgtaacccgtgtaagatttgttccgcatcttctggtgttggttcatcaaccgtcaccgtcgcgaaacgccgttctaaggctgcatctttttcgatgtatttttggtattcatcaagcgttgttgcaccgattaattgcaattcgccacgggcgagggcgggtttcaagatgtttgaggcgtcaattgcgccttctgccccaccagcaccaattaaggtatgcaattcatcgataaagaggattacttggccatcttcatggatttcttcaataatcttcttgagacgatcttcaaattccccacgatacttagtgccagcgactaatgagcccatatcaagcatcattaaccgtttttgttgcatgtcgcttggcacatcaccgttgataatccgttgggcaaagccttcagcaatcgccgttttaccgacaccgggttcgccaattaaaactggattatttttagatcgacgcgctaagatttgcacgagtcgtttaacttctgaatcacgaccaacgactggatcaatttgattttcgcgggccatttgggttaaatcgcgtgccaattgattcaaagtaggcgtgccttcttgatcaacctttttagcactggctttagcgcgtttcttagcagttgcagcatcaatccccatcttttggagtaataattgacgtgttttggctaaactgaggcctaagtttaatagaatacgggccgcaataatgtcatcatcgcgtaataacgctaataataggtgtgccgtcccgattttaactgagttagcttgttgtgattcaacgcgcgctaaatccagcacttgtttggctttaggtgagtatggcaaatagccgcccacacccatggcaacgattgaatcaccataaccggttaagcgttcaatttcttccaagacatcagtgggtgtcacaccgagttcacgtagtgcgttcccagcaatcccttcgctttcgaggacgagcgctaataacagatgttccgtccctaatgcatgatgattaaacttcttagcttgttcttgcgctaacattaaaacgtttttggcacttggtgtaaatagattattcatggataatcccccactctttacttaatttcgtaacgtaatctttctaagacagcaattagcattcgtgcgcgtaattgctcttctaactgcttatcattgacggctaatgtctgcgcatttagcattgctaataccaaattcccctctttttgcgataaaatctgctcatcatagagtttttggataatagctaatgtatcggcttgcgagattcgatcctcaacactaccaatcaacgcttctaaaaagtcgcgatcatctaagaattgaaccttaacgatgcgaatgtagccgcccccgccacgcttactattgacgacataccctcgttgttctgtaaaccgagtattaatcacatagttgatttgtgacgggacacagttaaatagtttagcaatttcggagcgtcgaatttcaatctgctcgctgtcagccaatattttttttaaataggcttcaataatatccgagatattctgactttgcaaatagatcaatccctttttttcattcttcagcgcttataattcagtctaaaaatttaactttgactaacgttgactattattataacgattattcgttcaaaaggaaagtttgaagaactgcacaaaaaaagacttgttcgacaacaagtctttgagagtcgggaaaacaagatttgaacttgcggcccctacgccccgaacgtagtgctctaccaaactgagctacttcccggagagttatttaattatttacgggtacaaaaaaagcggaagacgggattcgaacccgcgacccccaccatggcaaggtgatgttctaccactgaactacttccgcattttttattaactttttgtatccagtcgggaaaacaggattcgaacctgcgaccccctggtcccaaaccaggtgctctaccaagctgagctatttcccgttatatgcacccagtaggagtcgaacctacaaccttctgattcgtagtcagacactctatccagttgcgctatgggtgcatttttcattatgatgccgaggaccggaatcgaaccggtacggtagtcacctaccgcgggattttaagtcccgtgcgtctgccagttccgccaccccggcttaatcataatgaaagcggaagacgggattcgaacccgcgacccccaccatggcaaggtgatgttctaccactgaactacttccgcatcttaatgccgactagacgattcgaacgcccgaccctctgattacaaatcagatgctctaccaactgagctaagtcggcataataagataactttcattgaatattcaattgaatgcgggtgaagggacttgaacccccacgtctatatagacactagaacctaaatctagcgcgtctgccaattccgccacacccgcattttggcgtgtaacttggccgatgagtcgtgacaggctcgaactgtcgaccctctgattaaaagtcagatgctctaccaactgagctaacgactcaatggaggttacagggctcgaacctgtgaccctctgcttgtaaggcagacgctctcccaactgagctaaacctccattaaatatagcgtggcaacgtcctatcctcgcaggtagtttcccaccaactactatcggcgctaagaagcttaactactgtgttcgacatgggaacaggtgtatccttcttgctatcgccaccacactattttgtgctttcgcactgagaagaacttcgttctctcaaaactgcataataagtaatatttcatttcaaaagcctaacattgcacctttggttaagtcctcgaccgattagtactagtccgctccatacatcgctgtacttccactcctagcctatctacctgatcatctttcaggggtcttacttccataaaggaatgggaaatctcatctcgaggggggcttcacacttagatgctttcagcgtttatccctgccatacatagctacccagcgatgcgcctggcggcacaactggtacaccagaggtatgtccatcccggtcctctcgtactaaggacagctcctctcaaatttcctgcgcccgcgacggatagggaccgaactgtctcacgacgttctgaacccagctcgcgtaccgctttaatgggcgaacagcccaacccttgggaccgactacagccccaggatgcgatgagccgacatcgaggtgccaaacctccccgtcgatgtggactcttgggggagataagcctgttatccccagggtagcttttatccgttgagcgatggcccttccatacggaaccaccggatcactaagtccgactttcgtccctgctcgatttgtcaatctcacagtcaagctctcttatacctttacactctacgaatgatttccaaccattctgagagaacctttgagcgcctccgttacactttaggaggcgaccgccccagtcaaactgcccacctgacactgtctcccgccacgctaagtggcgcgggttagagtggtcatacagttagggtagtatcccaccaacgcctcaatcgaaactagcgttccgatttctacggctcctacctatcctgtacaaactgtacaaacactcaatatcaagctacagtaaagctccatggggtctttccgtcctgtcgcgggtaacccgcatcttcacgggtattataatttcaccgagtctctcgttgagacagtgcccaaatcattacgcctttcgtgcgggtcggaacttacccgacaaggaatttcgctaccttaggaccgttatagttacggccgccgtttactggggcttcaattctgggcttcgcttgcgctaactcatcctcttaaccttccagcaccgggcaggcgtcagcccctatacgtcatcttacgattttgcagagacctgtgtttttgataaacagttgtttgggcctattcactgcggctgacctgacggtcagcaccccttctcccgaagttacggggtcattttgccgagttccttaacgagagttcactcgctcaccttaggatattctcctcgaccacctgtgtcggtttacggtacgggtagtttatttctcactagaagcttttcttggcagtgtaacatcaggaacttcgctacttaatttcgctccccatcacaacttgtccttaaagaatcaagcatttcactcaactcaagacttgttgcttggacacacatttccagtcgtgtgcattccttagcttcctgcgtccctccatcattcaaacaaaataaactagtacaggaatatcaacctgttatccatcgactacgcctctcggcctcgccttaggtcccgactaaccctgggaggacgagccttccccaggaaaccttagtcatacggtggatcagattctcactgatctttcgctactcatgccggcattctcacttctaagcgctccactagtccttacgatctagcttcatcgcccttagaacgctctcctaccgcggacacttacgtgtccacccacagtttcggtattatgtttagccccggtacattttcggcgcagcggcactcgactagtgagctattacgcactctttaaatggtggctgcttctgagccaacatcctagttgtctgtgcaccgccacatccttttccacttaacataaattttgggaccttaactggtgatctgggctgtttccctttcgactacggatcttatcactcgcagtctgactcccggaactaaatcaatggtattcggagtttatctgaattcagtaacccatgacgggcccctagtccaaacagtgctctacctccatgatccaatattccgaggctagccctaaagctatttcggagagaaccagctatctccaagttcgattggaatttcaccgctacccacacctcatccccgccattttcaactgacgtgggttcggtcctccagtgtgttttaccacaccttcaacctggacatgggtaggtcacttggtttcgggtctacatctatatactcactcgcccatttcagactcgctttcgctacggctccagcttttcactttaacctcgcatataaacgtaactcgccggttcattctacaaaaggcacgccatcactcattaacgagctttgactaattgtaggcacatggtttcaggatctatttcactccccttccggggtgcttttcacctttccctcacggtactggttcactatcggtcactagggagtatttagccttgggagatggtcctcccggattccgacggaatttcacgtgttccgccgtactcaggatccagaacggaggtcaagttgtttaatctacgtggttatcacactctttgactcagcttcccagctgattcgattacaacttaacttggtaactccaaagttctgtcctacaaccccaagaagcaagcttcttggtttgggctcttccccgttcgctcgccgctacttagggaatcgatttttctttctcttcctgaaggtacttagatgtttcagttcccctcgtctaccttcattaagctatgtattcacttaatgataatactcgattaaaagtattgggttcccccattcggaaatctccggatcaaagcttacttacagctccccgaagcatatcggtgttagtaccgtccttcatcggctcctagtgccaaggcatccaccatgcgccctttataacttaacctatctttacctacggtaaagggttattatttgagtttagcgatatgaactaattcatatttctattattaaaaaactctttaaaacgcaatgtttttctcggcttttaaaactaatatattacttattatccagttttcaaagaacaaagttacgatgactattgtcatcaatggaggataacgggatcgaaccgatgacctcctgcgtgcaaagcaggcgctctcccagctgagctaatcccccataatgaaactattaaattggtacaatgggcctaaatggactcgaaccatcgacctcacgcttatcaggcgtgcgctctaaccagctgagctataggcccaaaaacgtccttaatgatgagagtagacctctcaaaactaaacaaagttttgatttcgcaaatgtacaaggttttccgtattattccttagaaaggaggtgatccagccgcaggttctcctacggctaccttgttacgacttcaccctaatcatctgtcccaccttagacggctggctccccgaagggttacctcaccggctttgggtgttacaaactctcatggtgtgacgggcggtgtgtacaaggcccgggaacgtattcaccgcggcatgctgatccgcgattactagcgattccggcttcatgtaggcgagttgcagcctacaatccgaactgagaatggttttaagagattagctaaacctcgcggtctcgcaactcgttgtaccatccattgtagcacgtgtgtagcccaggtcataaggggcatgatgatttgacgtcgtccccaccttcctccggtttgtcaccggcagtctcactagagtgcccaactaaatgctggcaactagtaataagggttgcgctcgttgcgggacttaacccaacatctcacgacacgagctgacgacaaccatgcaccacctgtcactttgtccccgaagggaaagctctatctctagagtggtcaaaggatgtcaagacctggtaaggttcttcgcgttgcttcgaattaaaccacatgctccaccgcttgtgcgggcccccgtcaattcctttgagtttcaaccttgcggtcgtactccccaggcggagtgcttaatgcgttagctgcggcactgaagggcggaaaccctccaacacctagcactcatcgtttacggcatggactaccagggtatctaatcctgtttgctacccatgctttcgagcctcagcgtcagttacagaccagacagccgccttcgccactggtgttcttccatatatctacgcatttcaccgctacacatggagttccactgtcctcttctgcactcaagtttcccagtttccgatgcacttcttcggttgagccgaaggctttcacatcagacttaagaaaccgcctgcgctcgctttacgcccaataaatccggacaacgcttgccacctacgtattaccgcggctgctggcacgtagttagccgtggctttctggttggataccgtcactacctgatcagttactatcagatacattcttctccaacaacagagttttacgatccgaaaaccttcttcactcacgcggcgttgctccatcagactttcgtccattgtggaagattccctactgctgcctcccgtaggagtctgggccgtgtctcagtcccagtgtggccgattaccctctcaggtcggctatgcatcacggtcttggtgagcctttacctcaccaactaactaatgcaccgcgggtccatcctaaagtgatagccgaaaccatctttcaaccctacaccatgcggtgttaggttttatgcggtattagcatctgtttccaaatgttatcccccactttagggcaggttacccacgtgttactcacccgtccgccactcactcaaatgtttatcaatcaggagcaagctccttcaatctaaacgagagtgcgttcgacttgcatgtattaggcacgccgccagcgttcgtcctgagccaggatcaaactctcgattaaaagtttgtagctcttgttttgttacttaatttatttgctagcgaaattgacttcgcaaatatgttgtgccccgaagggcgaccctacacatttggtttatcaaaactttgttcagttttcaaaggtctaccttatatgaatcgccgttacttaaaacttaaaatctcataagcaacgcaattaatcatatcatgtgatcaagttgatgtcaactgctttttaaaaataatttttatcaacttctcaatcacatgttcatctctcgacaacatagaatatcttaccatcctagtgggacaacgtcaatcactattttcaatattttttaaaaaacttgaaaataacctttgccaagcttaaaaaaaacgttttaatccactaaaaagcatccctaattgcgctactgattatcccttacaacacttataaatcgcgatttcgccactatttcaacgaattggtataggtaaaaaacgtgttggtcaacaaatctctcaaatttgttgaccaacacgccataatcactactaatagaagtcttccaagcgttcataatctaatatttcaacctgtcgaccttgtctttttatcaattgccgctgttctaattgcttcaattgccgcgataaagtttccggcgtcgtcccaatataagtggctaattcttttaacttcatcgggattttaaccgtcaacgtctcactgaccttcaccaaagccaatagataagtcacaattcgcgattcaaccgattcgatattcatcagattagcttgttgttccaacttaatcatcttattagccgttacttctaaaagtttcaaactaatttccggataagttaatagtagttcttgaaaaggtgcgcgaggcaatgtgcagatcacactgtcttggagtgcctcaccatatacttgttcctcttgattcgtaaagagtaatttctcaccttcaaagtcgccaggctccataatccgcaatagttgttctttacccgctgcggataattgataaaccttaatactcccactagccagaatcactaggcgtttttgcgcagtcgggcttatgacttgctgacccttagcaaccttttcgtggtgcgttagcgccgaaaccttcaggagactatcgtgatcaaggtgactaaatatcggtactagttctgcacaaatatgttgttcaacagttgccacacgcccacttccttctatttagtcgtcatcttcttcatctaagccttcacgtgcatccttaccgagttggctctgcaatacgcgaatttgatgttggttataccctagcatatcaatcatatcagttgctaaagcaaatcgttcttctttttgggcgagcttgatcgcccgtgatacgaataggttggcggtgttaaaatcgttgaccaattccgccatcatagctggcacatcccaatacttgatgcgggcatcttcagtaagcatcccgtattcagtatattctgcttgcgtcgtcgggattacttcaccctcatccaataatcgttcagtcgtcttatctaatagcatatcattttctgttaataaagttgccacttgtgccttgaaggtgccattatcaatccctttggtagaccacttcatctgacggagtttgcgccgttggattgtgagattagccataatgtgcccgatcattgcaccagccgttggtgtatggtgatccacatccgcttgtttcagttctgcttggtaacgttcttcaattgccgctgttgttaacatctcaatgccccctatttaaccttcacacttttaacgttgtagcccagattcgtgaccaattgggtcaattgttctgggttagtcgttgtttcatcatattcagttttaactttgcttgcattaaatagtactttgaccgattcgacgcctgcttgttgactgacacccgcttgaatcttttgcatacatgatggacatgagagttcatctaattgcattactaacttcgccataacaaaaaccaccttttcttcacttgataccttcactatactgccagtcgcatgattaaaaattgatcgccatcaagtttagcgaactttaaaccgaattaagcgcatcgcatttaaaatgacgactaaaatactgatttcgtgaaccaacatcccactggccatttgaacgtagcctaaaatcaatcctaatagaagtaacgcgaccgttccaaccgcaatcacgatgttttggaccgtattatgggctgtcgccttagtgaggtaatcggcgtagacgacttcagaaagtgtcgattgcatcaatacaatatccgacgtttcaattgcgacatctgtgccggaacccatcgcgatcccaatgtccgcaagcgctaatgacggactatcattgataccatccccgataaaggcaactttttggccttttgcttgatacgtcttcaaataatcaaccttctccgctggtaacaagttcgcgtgaaattctgtgatccccacctcacgggcaatggctgccgctgtttgttcattatccccggtcagcatcacaagatttttaacaccggcctttctcaaacgggccaaagctgctttggcttctggtttcaccgtatccgcaatcccgataatcagtgccaacgtttgattaatcgccaccaacaccgttgattgcccagctcgttgactggcttcaatcaccgcgcgttgttgcttattaacgataataccggcgtccgtcaataactgcgcgcggccaattcgaaccaattgttccccaacttgggctttaacgcccagtcctttgagcgtttcaatgtgagtgacaataggtaaagccgttaagccttgttgttgggcataactaaccaccgccagcgctaatggatgatccgattgcttttcgacggctgcagctaatttcaaaacaatcgcttcatcagccgcatagttcacaacttgtgctactgccgtttcacctttagtgagcgtacccgtcttatcgaaaaccattgtatcgatcccggccatcgtgttaactacctcgccgcctttaatcaagacgccgtttttcgcaccgttaccaatcccagcaacgattgaaactggcgcgccaatcactaaggcacctgggcaacccaacactaaaatcgtaatcgctaatttaaaatcgcgtgtgatcaagccgaccactaacgctaataccaacactgctggtgtgtagtaagtcgcaaaacgatcgataaacttctccgccggtgatttactatcctgcgcttcttccaccaattcaacaatttgggcaaaagtcgtgtcatccccaacttgattagcgactacggtcagcgtgccattgtcgacaatcgcgccagaatagacgctggcaccaacttcttttttaaccagctgtgcttcacccgtaatactggcttcattaacaaaggcacttcccgtgataaccgtcccatcaactggcacctgaccacccgctttaactaaaacgtgatcgccaattgccacatcgtcaacatcgactgccgtcacagtgccatcatctgcgaccacttgtgcggtttgaggtgccatctccgataatgaccggattgattcccgagtttttttaagtgttcgttgttcaagataactcccgaataagaacaaaaaggtcacaatcgccgattcgttgtattcgccaataacaaaggccccaatcaccgcaatggtcaccaataaatcgatgctcaccactttgaccttcaaggcttggtaagcctgcatcaaaatcggcgccaccccaagcactgaagcaactaacagtaacccttgcatcacaacaaccggcccacctaaccagtaccaaccataagccaccgcaattaagacccccacggccaacgctatttgattcttaaccgcctgcaaccatctttgaaatcgcatttgaatcccttctttctatctgttgtctccattatagaaggccccgaattgaaagaacttgatagccatcaagttagtaaaaattaaaaaaatggattttattagtaaaataatcgtataaaacatcgtttttactaaaaataaaaaagctttactaacttagtaaagctttttgttagattgcgccttgtaaataatcatcatcaaagaaatcagactaactacactaatcacgtgccccactttttgaagcggcgtttgctggtaaaagaccgtcatctgcccactgccctttaaggtaatttgcgttaagccattttgaggattcatttgcatcggtatcaatcgtttctcatggttaatattagcaacgtagcccttgtaataaataaacgggacctcgacaaccgctttttggtgcttaagcgtcgtaaattcgaattgatactgcccccacgtatgctggacgttggctattttgactttagcaggttgatactgaatcacttgctttttatgcttcaaaatcttttgatagtcagtctgttcgggtagatactcatgccctgcaccaatatagtacggattaggttgattgtattgcgcattggttctaaaacgccaactttgattttgaatactgtttgtcgcataaatgacattgccgacgcctaacatcagaataatagcgtagaaatagtacttattattcaataattgcaaatcatccttggcaatcaagtaactgacgattgctgtgatgattgcaaaaaaacgccatggaaattggattgtattaataatcgtatggtcgaataattgccaaggcatcaatggcgtgaccattataaacagaccgagtgcgatcacaattaaatcacggtcatttttggaccgccagaataggtaacacgctactcccaatcctaacaaaatcgtgattccaacattgactgtattcgcgtggaaaacagcgttggttaacgaattacggaccacttctttaaaagctagcgtgcggtctgataaaaaggctagcggttgagcagaaacttgaaacgttgtcgttaccatttgttcgcccacggctaagaagtaatgcgctaataggccaagtgacaacccaccggatgctattaaatacttaaaactaccatttttgtagagcgccttaaggttcaacaacgtgtagatcacgatgaaaatacccatcatttctacagaaatcatatggctgtaaccaatcgcaaccatccccacagctagcaagtaccaatgctggtgcttaccagacttcaacctggtcatcattacaatgactaacggaaaaaaggtcagcgcgatgacttccccgattgcctgacggttaactaaatcagcaaaacgatagatactaagaccatacagtaaagcaaagattaaggccttcttcttactaaaccctgctaatttaccagaaccgtaagtcaccagaaaagtacttaaattgataaaaattgcgaagatcacgaaactttctttaatcgacaagcccagcactcttaaaatagctggtagataaagaaatgtatctggataaaaaagactcgcagcataacccatcccaccaatgaaaaagtaacttattttagggaaaaaatcgccatgcttaattgagagcgctaagttctccactctattcatgtgaaaatgataatcggccccagataaaatcttattaggttgtaaataaacaatggcgaccattgcgatactaacgattagaaaaaataagaacgttacagttacaacgtgttgacgataaaatttttttaaaccgatcattatctgcacctcgtaaagtcttcaacatatcaactaccctctagatccaatagtggacacttgttatagattaactttaccgaattgtacttagtggtgtacagaaatttgtttagttatggcaaattctataattaatccgaacagaaattaaaaagcccaaagcaatcacttacaatggtagtagctaattccaaccaatatagggagtgattactttgggtacatctactttatcacgttttcaacgtggcgcactagcacaactggtcaatgaggggaataaatcttaccaagtaatggctgacgccttaggcgtcgccaaagctacgattagctatgagttggaccgagttaaaccttatgatccagaattagctcagcaagatgcagatcgcaaaaggcggaattgcggtcgtcgttcgatgctgacggcagcattagcgactttaattaccaatcacttacgattaacctggtcaccagaaaccattgcggccgcttataacttgagcactgcgtcaatttataattggcttaatcgtggctggctccccttcaaattgactgatctacccaatcggaatgtccgccagcaccgagtgagcgaaaatcgtgggaaatttacaagtgggacttccatcgaacaacggccaacaactgttaatcaacggttagcttttggtcattgggaagtagatacggtgctttctagtcgaagtgagtcacgatcatgtctggttacattcgtagaacgtaagacccgacttctatgggccatcaaagcccctaatagaacggctaaggctctaaacaccgcctttggcaagtttatgggggccttcggtccccaagtaaaatccattactgttgatcatggtaaagagtttgccaattatcaggccttagaacaggattatcagatcaaagtttatttttgccatccatattcaccatgggagcgaggttccaatgaatattttaatagacggttacgctggttcttcccgaaaaagaccaattttagccaagtaacgactgatgagatcctagcagcacttgaactaattaatcaacgaccattaaaaatacatcatcaacagactgccattgaaagattccgggcttgttcggattaaacttgtaatttgccttattaataagataaaaattaatatcaaaaaatatagaataactataactcgattaaatacataaaaaatagactgattaattatcagcctattataaatttcgctatttataagtgattagaacaatcattaactaaaagcatttaagtaatccgtactgatatcaaaatgacgcgcattacctaattccgggaagtataaatcactggcccattgccacgaggcattttccgtgtgtaataactgattctcagaaggattcattggccattcagctacccagcaagtctttggacccaatttagtcatatctaacactgacgaaaaccatgatttagaagaatggcgagtattccggtcaaaataaaaaagccaagttgaagtgaacttagcttttcttaacacttatttctgattgtattgttttaacgctaatgcaaaatctccaagtgttgccgatccattgttctcaactaacggcatcgttatataatcttctaacttagggacttcaacataattgtttaattgttctttaaattgcaatctaactttatctaagaagattttattaactaccccgcctcctaaaataattttattagggcgaataatcaaggtttgttgcaccacagcttgtgctaaataataggccataatatcccaaactgggtctgactgatcgacatcctgtccttttttgcctactcgcttctcaaaagtgggtccagcaatcaatccctctaggcaatcaccgtgaaatggacagattccttcaaattttaaatcatccggatgtcgttttacgagaacgtgtcccatttcaggatggcccaaggttccaattaactgaccatcaataatagcaccggcaccaacacccgttccaactgtgtagtaaactaacgaatcaacaggttgttgcgctatccgagcagctacatattcaccgtacgctgagccgttaacatcagttgtaaaaataattggccgtgcaagttctttctttagataacctacaaaatcaacatcatgccacccaatcttgggagtatttgtaatatatccatatttagcgtgatttttccgcaattcgattggcccaaatgaagcgactgttattactgtcacatttgggaattttttaaaaaaggtgactactcgcgctaaagtttcttgtggcgttgtcgtcgcaaatgttactttatccttaacttgatagtgctcatctcccacggcacaaacaaatttagttccgccggcttccacactgcccactaataattcactcatgttacttttcctcattcccgatagctacaaccaacgcatcatacggctgtaatacaccacttgtcgctattttatttaataataaattattgctaataattttttgattaggcccgaagtgctgaatgggtagcgtataactttctctattcttagataagttaataataactaaccaactctgttctcctaacatccgtttgtagctaatcacattttgattacctgttggtacattttcaaatcggccttggcgaataattgcgttacgttttcgtaattttattaactgctggtaagtcgcataaatagaccgttcatcttgtttggccaattcaacattgatttctaaatagttaggatttaccggtaaccatggtgtcccatctgtgaaacctgattgattcttaccattccattgcatcggatgccgcgcgttgtctcgacctttagcattaatcccatttaggatatcacttatcgcatagccttgttgctgtcgttgttggtaaactcgccgactctcaatatcctcaatttcgtgataactcgtaattggataattggtcatgccaatctcctcaccctgataaatatacggtgttcctttaagcatatgcaggtaaattgctaatgcttgcgcacttttttcacgatactggctatcgtctccccaacgtgacacaattcgcggtaaatcatgattactccaaaataacgagttccaaccaacgccatctagcgctaattgccatttactaaataccgcatgtaactctgctggaataagtggttttaaatcccagcgagtcatccctgattgtttatctaaattaatttgttcaaattgaaagatcatcgatagttcgtggcgattaggattactgtacatctggccaatttcgggtgttgccccccatgtctctccaaccgttactacatcatactgtgaaagtacccttgcgttcatctcttgaagatacgcatgtaattgcggtccgttttccttaattttgcggtcaggttccttccctatcaaatcaataacgtccatcctaaaaccaccaatccctttttgaagccaccaagtcatcatctggtagacagcttctctaactttaggattttgccaatttaaatccggttgttctttcgcataaaaatgtaaataatattgcccagtaaccgcatcaaacgcccaagctgatcctttaaaattactttgtaaatcattcggaacactaccatcggttgcagggtctcgccaaatataaaaatcacgatacggattatcttttgattttcgtgcttctaaaaaccatggatgttggtcacttgtatgattaacaactaagtccataacaattttaatcttacgaatcttcgccgcttcaattaactgctccatatccaccatagaaccatattccggattaattgcctgataatctgaaatatcatagccattatcaacattaggggattgataaactggtgatagccaaattgcatttacacccagatcagctaggtaatctaatctttgaataataccttgaatatcaccaattccatctccattactatcttgaaaacttcttggatagacttgataaaatactgcattttgccaccagttagtttgcatgtaactaccccttaatcctttttagcgtgtaattgaataatttcttcgccttgcatagcagccttgtcgactgttaaaagcggatcaacttgtgcatatcccgctgtattcgtcacaatagtcattgttagcggtgttagccctgcttgtttaatcttatcaatatcaaaatgacctaataaatcgccttcgctaacatgttgtccctgttggacaatcttttcaaaacctataccatttaaattaactgtatctaaaccaatatgaattagcacttctgcaccatcatccgattttatcccgtatgcgtgaccagtattagccgcaattgttatcacaccggtaactggtgcaagtacatcctgagaagttggcataatcgcaatgccttttcccattgcttcacttgcaaaaactggatcaggtactgatgctaagtcaacaattcgtccggtaactggtgcactaatcttttcatcttgtaatctctccactacttctggggtagctggtgcttcattgattatttcttcttcagttgtcttcattgcctttttaccgtataagtatgtccccacaaaggcaattacgaaactaataatagctcccatcataaaactagggatgctcttaggtgcaatcgcaataaacccaataattcctgcaggtcccattgatactgataaaacatgtaataaaccaataataaacgatgagattcctgatgcaattaaaccaataaagaatggaaacttcaattttaaattaaccccaaataatgctggttcagtaattcccaacatcgcagaaatcccagcagaagtcgttaatgacttttgttgtttattcttagtaacgaagaatacagcgaaagttgcagccccttgagcaatatttgccatcgctgcaacgggaaaaataaacgatccaccagttttggcaatatctgccaaaagtgtcgtttcaattgccgggaagctttgatgtaagccagttaagacaattgctgaataacccaggccaaaaatccccataccgactgcacctaacgtttgataagcccaaactaaactatcagtaacaccatttgaaacaattctcaatgcaggaccaactaatgtaaaggttaaaaatcctgtgataataatcgataacattggtgtaaacgtaaaatcaacagcatcatttaaatgtttatggaagaatttctctaaattagcaagaatgaaggcaactccaataaccggaattacttgaccttgataaccagcttgcgcaatattcaatccaaagacatgccaatacgtcatatgccctgtagcgatactttcagcaaccccataaccattaactaggttaggcataaccaacatcattcctgctgccgcacctaaatatggatttccaccaaatcgtttagttgcagaaaatgcaattaaaattggtaagaaggtaaatggcgctgacgacatcatattgacaatctcagcgaatcctttccactgtggaaacatctggacaattgattgtgcgccaaacaagccttgacctgtcaaaacattattaatagccattaataggccgccagcagttaaagctggtattaatggcacaaagatatcgcttaaaaccttaatgaacttcataataatattgtctttattatcagccgcaatattttttaattcttctttagaagcttctttaatatttacaatcttaataaattcgtcataaactgtattaacatcccctggaccaacaataatttgatattggccattcgcgttaaacgtaccctttagatctggatcattatctaatgctgcttggtctattactttcacgtccttcacaactaatcgtaacctagtcgcacaatgagcagccgcaaccacattatcttttccaattgcctgagctattcgtttcgctacttccttatgattcatgccgaacactccttttaacattattgttttacgtatttttgtaaacgcttttcaaatacgataatacaaccgtttacattttatgtcaaacgattatcatattttataaaaaaacatctatactatacttatttataaggatttaaaagaatgacatacgtttgacatatcaaacgtttacatttatattatatttattgaataacatgtcacaaaggagtttattatgccattaattacaaactggacacgtcaactacgctatcaaccttactcagattggtccatcgattatcaacaacaattgttgaatcgtgtccaaaattcaccctatcgtcttaattaccatattcagccagatacaggtttattaaatgatcccaacggtttctcttatttcaatcaccaatggcacttattttatcaaaattatcctatgggaccagttcacggtctaaaatcctggcaccatcttatttcagatgatcttattaattggcgcaaagcaactcctttattacctgacggaaatttcgatagtcacggcgcgtattctggtagtgcattaccaattaacgatagactcttccttttttataccggtaacgtcagaaatagcgactggaagcgatcaccttttcaaaacggtgcatggctaagtcaagcaggtaccatcagcaaaatatctgaacccctaatcaaacaaccacgccactataccgatcatttccgagacccaatgatttttaagtatcaagaccaaatcatggcgctaattggcgctcaagataacaataaaattggtaagattgccgtttttaaagcggatcacaataacattaatgattggcgcccactcggcgaattagcttttacaagtgaaaaactaggttacatgattgaatgtcctaacctcatctttattaatcatcagccggttttaattttttgcccacagggtttaacatccgaagttatttcttaccagaacatctatccaaatatgtatgtggttggtcattcattcgaactcaatacaaccaccattacgcagccttctgagcttactaatcttgatgacggctttgactgttatgccacacaagcttttaatgctccagatggtcgtgcactggcagtaagttggttaggtttacctgaaattgaatatccaactgataaagacggttgggctcattgcctaagcctagttaaagaattaacactccatgataatcaactttatcaataccccgtcgaagaaacaaaagcgctccgccaaacaaaacaaatcctatcactcagtaaacaaagcataatacctacaactaacgcttatgaattagaactcgaagtgccggcaaacactagtcaaacactccacgtctttagcaatccctcaaaatcaaatggtttagtacttactatcgatacaacaaatggtaaaattacaatgaatcgttctaacgctggggtctcatttggccaacaatatggtcaaatcagaacaactaatgttcaaccccatcatcctattcatattaacttattcgcagatcaatcagtcgttgaactttatatcaactatggtgccaaagtcatgagtagtcgcctattccccacggaaaatcaaaatataatctgggcagaaataccacaaaaagcacaactttggcctttatctaaagtaaataacaactgatatgactagctttagggggaaaaaacgtgcctacaaaactaacggatgttgccaaattggcaaaggtcagtccgacaacagtttctagagtcattaacaactatggttatctcagccaaaaaacaattgataaggttcatgccgccatggccgaattaaattatcaaccgaataatttagcaagatcgttacaaggaaagaaagcccaaatgatagggcttatttttccctctgttagtaatccgttttttggagaattaattgagcgcctcgaaaagaaactttttgataaaggctacaagagtattctttgtgatagtaatcgtgagcctgaaaaagaaaaagcatatcttggtatgttagccgcaaatcaagtagacggtattattgcaggaggtcataataccgaactacaagaatatgaaaaaatgagtgcacccgttatttcatttgatcgactattgagtacacatattcccattatttccagtgataactttgccggcggtcaaatcgccaccaataccttgatcaacctcggtgctaaacggattggtattattactggcagtaacgaaactaattcaccgacacttttacgacttaatggctatttagatgcactacaaaaaaatggcttagatccttttgtcttccaaattaaaagtaccacttcgaatagtcttaaaaaaattgaaattgcgcgtattctacgtgaagaacacttagatggtcttttttgtactgatgatttaactgctatttccgtaatgaatgaagcccaaaatcaaaatattaagattcctcaagatcttaaactaattggctacgatggtactgagttaattcagaaatacttcccacaactaacaacaattattcaaccgattgacgagattgcctcgctgttagccgaactaattactctacgtattgaggatcctagtgctccattagagatgcgctatacactgcccgtaaaattattacaatctaattcaatttaaaaaaagcagttgggataaaattattttatcccaactgcctcttttttatttactaacaagacttaaaatgatagacaactgtatgaaaatcggtcttatttcgaggtaacgttaatccaacattcattaactcgtccccaccatattgttcacctgaatcggactgatataccttattaggatctaaataatttaatttaaataccggataatgcggtgctgcttgtgctagttcactgtaaatcaacacattaaattcactacgattttcattgatgatcaaccaagcagtgtagttatcatctgtaacaactaagcgatagaaccgaccaaattgagttaattgccgttctttttttgcaattttggtttgttgtttaatctgttgtttctcatcagcacttaattgcgttaaatcaagttcatagcctagattcccaaacctcgcaatatcaaacctcgtctgtatatctgttgttctacctacttgatgattaggaactgcactcacatgtgcagccatcgtaattggtgggtatagtaggctatagccatcttggataacaactctgcttggtgcatctgtattatcactcgtccaggtctgtggcatgtaatatagcatgcccggatcaaaccgtccacctccacttgaacaaccttcaaataatactgttgggaactcattcgtaatcacttctaacacatgatataagcctaaaatatatcggtgccaaacctcaccttgttgactatcatcgactgccgtactataaacatctgacatatgtcgattcatatcccatttaatataatctatttttccagtactaagatgttgtctcagcatttgtattagataatcttgaaccgctgggcgtgttaaatctaacactaattgatttctaccttccattggttcgtaatttggaacatgtaaacaccaatctggatgctgacgatatagattacttttccgtgaaatcatctcaggttcaaaccacagaccaaatgacaagccatgttgcttaatcgtatccgctaactgtccaattccatgtggtaatttagtctgatcaaccgaccagtctcccaaagatgtcgtatcatcattacgcccaacaaaccacccatcatccaaaacaaatagttcgataccaacatcagtcgcttcttgcgccaatgcttcacatttagcagcgtcaatcgcaaaatacattgcttcccaagtattaattaaaattggccgttcctggtggctaaaacgtcgcggtactaaatgatcctgatataattgatgaaaattctgactcattccgtttaaaccagccgtactataattcatgatagcttctggtgccacaaatgtttcattcggtgctaagcgccaatcaaatgtatctgtattcaagcctagctgtgcgcgaatattaccgtattgatcttgctcgacttgtcccatgaaattaccactatagaccaaatgaaatccataaaccacaccagtatattctgttgttttaggtgataaaagtgcaaaaaaaggttggtgttgcggactacttgccccacgaacactttctattttttgaatgcctggataaataggatgttgattgcgattagcttcattaatatgtgccccgtacaatgataaccaggatagcttttgaggtgtaaaatcgattgataagctttgacaattctgaattgtaattgctcgttgtccaacattcgtcacttcttgatgcattgcgataatatctaaatccttaaagattgtataatacatcgctacccgcacaccggctttcaaatcctccaaattaatccggagtgtttgtgcatcatcgtcactaacaacataagttgccggcaagtcacttaacttgggcttcccagtaattatttggtaatcacgatattctaggtcaaggtggttattgtgactagcttgttgaattgttaaagcagggattcgataatcacccgtatctcgtgttggacaaatcagtggtaactcacctaacgaaaccgttcgatccgtcgatggattaacagctaatccacggtccgtaaaccggatagtgttactttcatgatactgacgaatatgagcaccaaaatagcgatgaattacatatttttgttgaacgattgctaagaccatactgatacgcccattatctaggtaaaatattgcctttttttcatcaaaactaatcattttatcacatcctatttccacttatttattctataataaaatgaatactaatccacaacaagagtaacaaatttaatgggagggtaataaattggggcttaatcattcttttcagctgcactatgatcacacacagtactttcatttaatcggtggcggaaatgaaactgtcactgcaaattattattgggactgtcgccaaagaactgggaactattgcctttttcaatatacaattaaaggacaaggtcatttacaaattggcgatagtcattacaccctaaaacccggtgacgcctttttagcgacaattcctggtaaccagatttattcattagcgccagatagtataaattggcaatttatctacttggaattctcaccacattttattgatcaatggcaccaaatgacacaagatacgcccatactgaactttaaggaacatcccgtattcgttaaaaattgtctagcgttaaatcaaataggtctccaaaatacgtttagtgattatttcgaaaatacaagtcgatcagcacaatttttctttgatctcttacgaattagtcaacatactcaccaatcggctcaagataaatatccagaatggttaagccattaccgtcagtggctagatatccactacgatcaggacatttcattagaagatgcggctgatatttttaataaatcaaaatacacactcattaaagtctttaaatattactaccaacaatcaccaaagcaatacctaattgatttacgtataaaaaaagcaatgcgtctactcatcgagcatcccgaattaaccgtcaaaacagttgcgcaaaagtgtggctttcagtcagccaattacttcaccaaagttttccataaaaaaacaatgtattctcctctaaaatttgctcaagaaaatacattgcacgatagtagtgttcattattttaataactagatctgcgcttattaataaacttaattattttagcgttagttcatattcctcatgtctcttagggtcaacctgcgttgtgcccggaatgaaatgaatcgcttctgtgcctgcctctctggcttgatggtaataccacttcttccaccgtaagaaagctaagttcgtttctaatgccttaattttggcttccaactgacgttcgtgttcgaccataaaatcgtaacgatcaggtagcgtttcatcgcctatcatacaccaatcaataaactgaccgatttctctaatcggaatcgctgattttttcaagcagtcgattacttcgagataacctaaatcatcatccgtaaaaatccggtggccagctgtattccgtttggcaaatggtaataaaccttccttatcgtaatagcggagcgtatcgaccgaaacacccattttagttgcaatctcaccgattaaataagttgtcatcttttctccttgacctggagctagctccaggtagtatgcctttttatagcataatatagaaagcaggttttgaccactatgaataaaccattaatcgttattacaggcgctagctcaggatttggcgccgaaatcgctaaaatttttaatactgctggctacccagaattactcctcggtagacggactgctaaaattgaagcattacccttaaacttcgaaaacgtcttaatcgaatcagtcgatgtcactgatcaagcgcaatttaaagctgccattcaaaaggctgaagcaaaatttggccccaccgacttacttgtcaacaatgccggtgtcatgttactagggaatgtcttgaaccaagatgccaaggaatggcaaacaatgcttgacacgaacgtcatgggcgttctaaacggcacgcaaattgtattacctgccatgattgaacaccaacatgggacaatcatcaacatgtcttcattagctggtcgtaagactttcgtaaaccatgctgcctatgtcgcttctaaattcggtgtgcacggtttaagtgaaacaatccgggaagaagtctcaggtaaaaacgtccggatttcaacggtcgcaccaggtgctgctgaaacagaattactaacccatgtcactgatcaaggtgccttaacagactatcaagcatggaaagatagtatgggtgggattaccttagatccagtacacgttgctgaatctgttaaattcatctacgacatgccacaatcagtcaatattcgcgaactcgatattgcggcaacacgtcaagatagctaataaatttttaagtgggctgtggcaaatttacgtttgtcataacccactttttttatgcttgcccactactcgcggtccttggtactacttagcctagtaacatgttacacttgcaaactaatgattgttttacaacgctttttactctaaactagactatagaaagcggggtattacttttgccaaaatatgaagagatcgccgacacacttcgccagcggattaatatcgggggatgtcctttgatttagctgatgccaatcaaaccctcaccagtaaggttattaccttcaaagtcaccttcccctcaccagaagttaaggaacgccttactttaagcgcacaacaaccggtttacgaaatcattcgcttacggattatcgatggcgtcaacagcgtccttgaacacacatacatgcccgttaacctagcaccgggtttaacagatgaaattctagaaaattccatttacagttatttgaagaaagaccttcacttaacttttgcgggtgctttccgaaatattcaagccgacaaagctgataaatatgatcaagaatatctcgaatgtgcgcctactgatccggttttagaagtcgaacaagtggtctatctcgatagtggtcaaccgattgagtattcccggagtcgtaaccgctacgaccgccgcggttatacttacttggacgtcaataactgctaattacaacacaaaaagaagcccttatcacgttgataagggcttcttttttatagtactttatttttcaagatcttgtaatttttggttgtcatctaatactgaacgaccgccattaccaattttttgtaaatgattcataccgaaccacaatagaatcaatgcgactaccataaatagtagtaacgtgaagactgtttgtagcacttgaccgttacctaaaccagatgtaattgcttgtctgaagcctaggattgaataagtcattggtaagaatggatggatgacattgtagaagtggtttgtaatttccattgggaatgtcccacctgaaccacctaattggagcatcaagagaatcatcgccaagaaacgaccaggattgtcgaacgtcattgataggaacatgatgattgccatcgacgtcaatgagaacataattgatactaagaagaattgggcaggatgatcaacatttaaacctgcgatcatcatcaaaccaggttcgatgattgccataccgacagcaactaatgcgccgacagaaatcttacttaagtaccaagctgttgctgattgaccagtcattgaaactttccgaattgggaaagcaaagttgaagacgattgccccaacgaataaggctaatgaaagcacgtatggtgctaaagcatgaccgtagttaggcacatagctatagtttgagtgtttcaattcagcaggtgcagcgaacatatccgctgtcttattcgttaattggatatcgttaacttgttttgcgccacccttaagggcagttgctaatgtcttgttaccatcagttaactgaccagcaccgtcgtttaacttagctgagttagcagctaattgacttgtcccatcggctaattgaccaacaccactcgttaacgttgggatcttagcgtttaattgaccaagaccaccgttcaatgtttcagaacctgttgccaattgactaacaccacttgttaattgtggtacttggctattcaattgaccagtaccagttgctaattgttttgaaccagcagctaattgaccaacaccgcttgtcaattgtggtacttgaccgtttaattgcgttgtaccagcatacaaggcttttgaacctgttgctaattgaccaacaccgcttgtcaattgtggcacttgaccgtttagttgtgttgtaccagcatacaaggcttttgaacctgttgctaattgaccaacaccgcttgtcaacgctggtaccttactatttaactcgtttgtcccatcacttgcttttgatacgccagctgtataggcgcttaatcctggaattaagcctagttgactcggagtcccaacaaggcctaatttaatttgtcttaagcctgcattgatagtatctgttgcttggatagcccccatatctgaaggtttatcactagttttagttaaacgtgcgctaacagtttttaaaccacctgttaattcatcaattgcttgatctacgcccgatttaagttgaggtgctgcaacatataattcatttacaccttttttcaatgcttgaagacttgtcattaagttagtcatctgcgtttgaactgattttagatgtacaccagtatcttcagtattagttttaatcgtatttaaatctgcaccagatgaggcaagttgattagctgtagcagtaacactagtccccgcactttgaagtgcattatttagtttctgtgctaaagctggatcttttgataatgctgctttaatttgtggatcagaaactacttctgtaatagcttgtaattgcgcaccagtgttagcaacttgactagctgcacttgtacttacatttttatcatatagtttactattaatttgttgtaatgattgtcctgtacttgtagcatcagttgctactgccgttaagtccgttgttacttgttttgaaattgcatctgcttgtggactatttatccccgcgttaagtttctcaacaccagtctgtaattcgcccatgcttgatttcaataaatctaacttttctgatttactatctaactgatcatcaatcatattagcagcagcagataaggcgccacttaattgttgactaccatcgattaactgatcaacgccgccatttactttaccagcaccagcaactaactgatcactattactatctaaggcatttaatccactctttaattttgtaacgccaccggctaattgtccggtaccatcatttaacgtttgtaaacctgtatttaattgaccggcaccgctattcaattgactagcacctgaagccaatgcacctgttttactatttaacgtttgtaaacctgtgtttaattgaccggcaccgttgttcaattggcttgcgcctgaagctaatgcgcctgtcttactgttcaatgtttgtagacctgtgttcaattggttggcaccgctgtccaattggctagcacctgaggctaatgcgcctgttttgctattcaatgtttgtaagcctgtgtttaaggcccctgaaccggctgctaatttttgaataccgtctgataaaggtgtcacgctggtcttcattgtcatgacaccatcgttgaccttatcaacaccagctgtataagtgttcaagccatctgaaagtgtgactgaacccttcgttaacttcttagcccctgaagcggctgtgctgaagcctttaccagctgttttaacttgtttgaacatgacttgagcataagcctttgtcactgtttcacgtacttgggcgttcaattccttggcgcccatttcactgataacttcaccgatgaagttcaatgaatcatttgtttcatattggatttgcatctttttaggattcttatccaagactgttgcggcgtttgctgaaaagttcttaggtaaagtaacaactgtatagtattccttatccttcaaaccttgcttagccttcttggctgaaacgaaacgccaacctagttggtcgtttttctttaattccttaaccatgtccttaccagcattcaacgtttcaccgttgtaagttgctggttgatcgttatttacgacagcgactggtaattcaccagtactaccgtaaggatcccagacagatttcaggaaaaagacactgtacaagaacggaataaacatgattgcgattaacgaaatcatgatgattttattcttggcaatgaacttaaattcattttgaatcatcttcatctgtaaaactccttacttaattttgatgtataatcaattacattcaatatccacgataactgaactagtttaaccttttttcatgaaaatttcaacccttacacatcaatccgtcaaacaatggtcacaaaaaaagcgttacgggacatcccgtaacgctttagcatactaattacttcctataatatacattaatactgtactcgtcttatagattttgcttagccataattctctgtgtgatgtaaccaaagagcaccatcgcgataatttgaacaccataaatcgctaaataatgacccatttcgttcacatcaatcgttggaatcacaatcaatgtgagtgatgttacaatccgataaacccacgtgagaccgatgaaaaccaagattgcttttttagcccctcgcatccaagtacaagccaacaacattaatgtcacagttgtgatataggctagaataagatcaactaaataataccaagagaaattatccataaacgatgagaaaaccaattgcagcatcccaatattcttattcaattcaacgactagcaatgttcctggtattaataaaaggacaactgcggctaacattgataagcaaatcgttacaattaatttggcgtagaataaatgtttccgtttaatcccagaagccatcatcaaggccaaaacatcattattataatcgaccgataaaacgtggaacggataccaatataataagatgaaattggcggctatcaacaacatgatactaataatcataaatgaaccaaaagttttattgccatataactcagctggtagtgattgtgcgtttgccaataccaaggtaaaaataatattgagcaccgcaataatcccaaaaactaacatatatactttttcatggaaaaatttgaagaattccatttttacaattcgttgaatcgtcatctaatcacttccttaatttaatttattgtctaatgcacttagtacgccaatttcattgatttcgatctcagcatcaattaatttcatttggacttctcgccacttaggatctttaatcgataattgaatccgaccatcggctaacacttcatgttcataagccatttcggttaaaatcgcttgaacttttacattatcagtcgtgtcgacaacccgtaacttcttgtcactttcggtcgctaaatcaatcgtttcacgcaattgaccgtgatcaatcacaaatactgacttacagaacatttcaatatcactttgaacgtgacttgagatgagcaaggtcattgatccttcgctaattaatttttggaggtaagtcttgaaccattgtaccgtgtctaagtctagacctctaaaaggttcatctaagataagtagttccggttggtgcaataacgcgattaataagattaatttcttcttcatcccgtaagaataagttttaactttttgatttaagacagcttcaatgccaatttcagccgctaatgtgcgtgcttgttcgcggttaaattcaccccgtaagccactaaaataggccaagttaaaccagccggtttgattcatgtaaacagacatgccgtctaaaacaatccccacccgatttaaaatagccggattatcgcggacgttttgaccatcaatttgaatttcacccgaataattcgtaatgatattggttaagctcttaaataacgtcgttttaccagcgccattatgaccaacaatgccgtaagcaccgccatttggaatggttaagttttttaaatccagtgcaacattatttttatacgttacgacaagattgttaatttcaatttgcattgtattcctccttaactaatagtccccattataagggtttgaacccttaaagcggtaaagattaactaaatttaattaaaaaacacctaacaataaaccgattgttagacgtttttttgtgaatatattaaacgcgctctgaacgtgttctaccaaccatatccttgcggttggtttcacactctatcctaaacgtgctttttaagtctagtcccttccgcttaaccctgctccgcaaataaccgatgctgtcggttatttgcggagcagggttaatgctcagggcctacccagacttaaacgcacacttatcctaaacgcgctctatttttgtcatgccgcccatgtatggtaccaatgcttctgggattgtgacagtcccgtcttcattttggtagttttccaaaatagcggcgactgtccggcctacagctagacctgaaccgttcaatgtgtggaccaagttcacgtggccatcttcgtcacggtaacgaatttgggcgcgacgtgcttggaagtcggtacaatctgaacagcttgagatttcacgataagtattttgagcgggtaaccaaacttcaatatcataagtcttagctgatgtgaagctggcatcgcctgttgccaaagtaatgacatggtatggcaagtctaatgcttttaagatattttcagcatcgttagtcattttttctaattcattaaatgattcttcaggctttgtgaatttcaccatttcaactttgttaaattggtgcatccggattaaaccacgcgtatcacggccggcactcccagcttctgaacggaaggctggtgataaggctgtgaagtagattggtaattgtgcgccatctaagatttcatcacggtagaagtttgtcaatggcacttcggcagttggaatcaaggtcattggttcgccttcgttagtcattgtgtaaacatcttccgtgaacttaggaaattggccagtcccaaacattgattcgccgttaaccaagtatggtgtaatcatttcttcataaccttctttggcatgttgatccaacataaagttataaacggcccgttcaagacgcgcaccagcacccttgtaataaacgaaacggctacctgaaactttagcagcacgttcgaaatctaaaataccaagtttttcaccgatatcccagtgtgctaatggttcgaaatcaaattcacgtggtgttgaccatttacgttcttcacggctgaaactttcatccaaaccaactggtgctgagtcatcagggaagttaggtaagcgaaccaagatatagtcaactttttccttcacttcagctaattgtgcatctaattctttaatttctgcaccgacgttcttcatagcagcgatttgttcagttgcatcttctttattgcgtttagcaacagcgattgcttctgaagcagcgtttctgtttttcttcaattcttctgtgcggacgattaaagcgcggcgtttttcatctaaggcaactacctcgtcgatttctgcagcatcaatgccgcgagtcgctaatttatcctttgcccattggacattttcccgaattactctgatatctaacatagcactctctcctttttatagataataatcaacaaaaaaagccttctcatcccctaaattgggacgaaaagacttcacattcgcggtaccacccaagttcactgattaccaaataaccagtgcccttcattgctgataacggtcaggtgccgtgtagttattcactacccactattacgctggaatactggattcaataccttccaccaaccggtatctctctgtcaatccatataggcgcttattcacgtgtttttctcttgcattaagaataacccatttggctattaaattcaatcttaatcggctgacttttgtaaccaaagctctcttaataagccatataaacgcccataatggtcactatccgcattttgattccacttaaacatcactgcattcgggttaaccttattggctaatgagatacttgatgtactgatgaccatatctgcatccgctaaatcagcgtcatcgtgactagcttttacataacgaatatttttaagggacatcattaaatcgaaataccctaaaaatgattgttctgatacaacaacgactttgacaagaatcgttggggccatccgttggacaacctgccgcaagacattatacaaaccgctaacaatctcatcacgcaaatcactgataaaacctaactgcttattcatcaataggtaatcaattgtgtcttcaatatcttgttttaaaatcggattttcccttaagcgggtatagtcatccatcaaatggttggccataatcgacatcacatcttgtttaaacatatagatggtcatcacggttgccatcaacgtctgcactaaaccttgataatcttcatcctctagattcagatggtgttcaagatcaaccggtactttagccatgaaatccatcacaaattgataggtcttaggaatgtagcgttcatatcgatcatcataagatggcatataacggttatttccttgcaataaaatgggcccgaaattcatcaaatcataaaaattaaaggattcggccatcgcctcttctatcgtcatctgggccattgcatttttaatcattaccgctggccccatgaatggctggttaatataggttttaatcatgtttgggaccggataccgcaataaattttcttccgtagggccttgaatatagtggccttgcacaattcgatagtacattgtaacaaccaagtaggcacccaattcacgggttaaaacgttagggcttgccaattggaaccggtcgaccgctagatcgaacgcttttaaggcatccaggcgatcaatctctttaaaaggccacgtatggccatcagtcgataaccataataagattgttaggactaaccgaatcttattctcatcaccttcaaggcgaattggatcgtaatacattcgaatatcaaatgaccggattaaatcccgaacacctttcaaatgccgcaatgcggttgctttgctgatatcgtgtgatgtccaaaattcttcgaacgtcacttcttcacctttcaacaagatgtttacaaaatcaaaaacatctgattgattcactaaatgatagtgataggcatctagtgggacactaaataatctttgaatatcttcagtgtcttcaccgataacttcttttaaatcagcgacgatactcatataggtattatatagactaccataagtccggtttaataaggcggcgacctgttttaaattaacgtcgtcgactaatggttcattttttcgagataatgcaattctttttttgacgggtaattcatcccgcttcaagctcgcgatatccaacaacagaccatatttatcattttcagcctgtgttaaaaaaatactgtcatttctattcaactgactaacctcccggaaagcatctataatgggcaatttattttaccattaatgacttcgcaatgaaaccacacctccccttgataaacaagcgttgctttttgcgctaaaaatgctagaatatttaagtgacgtttggtgatgaaataccacatgttgtatatcaataacattcaaaacacattttatagtcaaaagagggagactgatgacattgctcgtacttgctggcacaattggtgcaggaaaaactagtttaacaaaatatttatctgatcatttaggaacggaagctttttacgaatccgtcgatgataacgaagtattacctttattttataaagatcctacaaaatacgcttttttactccaaatctatttcttaaataaacgatttgatagtatcaagcaagcttacacagatgataacaacatcttggatcgctcaatcttcgaagattcattactcttccacttgaacgctgatctcggtcgtgccacagcaactgaagtgcgcgtttacgacgaattgttagccaacatgatgcaagaattaccatttgccgcccacaagaaacgtcctgatttattaatccatgtccgcgttagtttcgaaacaatgctctcacggattcaaaaacgtggtcgttcttatgaacaattagaagccgatccaaccctctacgactactacaaggaattaaacagccgttatgacgcttggtacgacgcttatgatgaaagtcctaagatgcaaatcgacggcgacgtattagacttcgttgaaaacgaagctgatcgtaaaaaagtcatcgatatgatcgaccaacgggttaaagaattaaacgaacaacaatcaaaagcaatctaaatctgattaaaaaaaggcctggataagttattatccaggccttttttgcatacaaatgtgtacgttatcaattgagctcagatttttctaagtgtgatttttgaatccataattcgtgaacaatcccgtataaacgagcgtaatgatcactattagcattcaaccgccaaacaaacggcactgcttctgggtttgtataatctggtaaggtgatgctggccgtagtaaccactaaatcggcatcccgtaaggcttcatcactagtgctgacatcaacgtattgaatgttatccaatgccgccaagacatccatataacctaaataatcttgttcaaccactaaagcaaccttcacacggttagccggacgatactgttgaattaattgccgcatcaagttatagtacgctttcacaagcgcatctcgattaggttcaaataatcgaaattctggttcagataagagataatcgactgtctgactaacgccagcccgtaatcgttcattgggccgcaataattttaagcgttccattaattgatgtgatgctacggaagtcatatcattacctaacacatgaatattagttgtgaccacagataaggcattttgtaactcgtgatagactttatctgatatcttcaaatagcgctgaatatcaattggcgtccgttccaaaaagtgacgaacaaaatgataaacttctggtacataacgttcataaaccatacattcagtaatatcaaactgttctttcgattttagcggcatcggtccgtatttcattacaaaatacaacccggccgactcagcacgacactgtgcaggtgataattgcgccaatgttgcccgtaaattaattgaatcttccgtaaaatcagcaaccagataagtattagtcaaatcaggatacgggtaacgaatcaacgacattcgatcgtcttcttcaataatctttccttgcatcactctataataagaaatcgcaatcatataggtgccaatttcacgcgttaataagttaggctcttctagttgataggccttaactgcacaatcaaacgcatcatgcgccatttgttggtcaacgtcatcaaaaacccatgtatgtccaccagccgcaagccaatataaggtcaccaacgcaatccgaatcgccttttcatcaccttctaagtgaattggatcatacgcgatgcggacattaaaagcgcgaattaaatcccgtacctgttttaaatgtcgcaagacggttgccttactactcttgtgcttctcccaaaatgattggaacgacacgttaccaccatgtaataaaatttggacaaaatcataaacatccgaattttttaccatataaaaatggtacgcatcacttggtaccttgaagagctgacgagcatcatccgtatcagtgcctaatactgcctgcaagtcacctaccatactcatatacatattatataaactaccatagttacgatctaaaagcgccgcaacctgttttaaattcacatcatcaatcaggtaatcaacctgtctggccatactaattcgtttcttaacgggcagttcatcccacttaacgttagtaatatccaagaataatgcgtacttttctttctcagctagcgtcaaataaatactgttcgtattcatctaagtagcacctccagtccaaactaactatcatttaaaatgactgatgagctagaattaattttatattaatttgaatccttttattaccgcagttctactatacccttatcaaatgcaattaaacattataatcataaataatattttagaatattataataatatacatagtattgattattaacattgagctatgttaaataattattaatctcatcccgttattttttaggcgttaaatgttaaaaacgaaacaaaaaaagaacttagcatcattattagattttgctaagttctgattaaaaattttctaaagtgtcagctgccaccccatcggcgcttcgtaaggatctgttgaaatctgataatcatttctatacggtaaatgaagctgtagtgagctctccttaaggagattatcccccatccgtgtttctagactttgcgctgtcgtgtcacgtttcaaaattccatcgatccactcaccatcgctcttatccggcgctaatggtagcggtgctacattattgatattatatttaaaattattagtaatataaaatggattgtgacttgcctcattcgcatctagataggctaattttaaattaaaaccatttaataacggattataaacagttacctttggcgcctcagccgttccagtatcagcaaccgatttttgggccaattgaatctcgttgatagcgaccgttcttattgcttcaccagaagaatgacccaaaatatccgtgccaaatgatattttagcagggacggtcacttcaagagacgcatcaatctgtaacgtgaatttaaacgtcgcagtggtttcaatcttatccgcagcaattgttgccgccttggcatccgccgttgtggcaaattcaatcccgctagttttagtgagcgggtagctaatcttctgtgcctcagttttcacgtctccagctattgccttggtctgatcatttaaatcagccaataaactttcctgatttagctttacagaggtcccagtttgggcaccactggaataacgatgccactcacctttatcgttattaccgttactgttataccgataatataagccatagctgttaggtacattcgatagctttaactcccctgtaatccctagactaggtgcaggcttcaaagccccatcagcataatcaaacttagccgtcccaccactcttaagcgattgagaattcttactaccaggatcatttaaatcgatggaatcgataatgactttttttgcatcccccccatcatttaaatccggaaattcttggttattaccaaaaacagacttatcatgctctggggatataatcgcattatccaacgtaatattattcgccgcaacaacaccaccaatataaagaccatgagtggaacttccggcataataagacccatgcgggattaacatcgtaccaaatagcatcgtccctggactacggctggtataactaactgcagcggtttgtgccgttaaacctgaattatcctacttagcttgatcaaacgattctggatagttatcagaatcatacgtatctgtaaaattattcaataaatgtgctccaaatttcagaacattgggattactccaatcttcatctgatgcacccccaacctctttagcaatactattaacgtatcccggttcaccaacatctgtttcattcaacggatatttaaagttatcaacactcccgatataaaacccatctcccggttggaaatcaaatcttttatcattaaagtttttataattaataacaatgtatggtattttttctgaatctaatgttttcccatcatctttatagaaactatcagaaaagtgaaactgaatattcatgtgcttagcttttttataattctctgttaatctatctcgatcaatcgaaaccgcaacaatcggcttcttaccatccacttctgtagtatatggcttagttttttctcttgtttcggcactcacagttggatcatccgctttagcaacaatattgataatcacatctgtaacctcaggccacggatcagtaatatagaacggattagatactggtcttgatactttattctcattattaattggatttgtttgttttaaatccataatttcatccgtactagaccaaaaaccagcattttctgggagtaagttagcataaaattgactcacatcctgaatattctgctgtaaactataatctgttgctgttgaacccccacttgtttcgtacttattaaccccgttatcaacatactgtggtagtttagctaaattaccgtttataccttctaccattttattcttccaaagaccttcaaaagtcccttgttgccctttgctaaaaccagaaagcgaaaccgacattccagggtatgctgcttcagcatcggctttcgatgtatcagttgcaaactcagtatttttagaaagaccatcttcaactagcggattttgccacataccacctaaatgaaaaactaaatttttcattccttcagttttatcatatattttttcattcccttttgtgaaatcattaataatgactgctggattttttaaattcttaaaatagttatcatatgctgtattcgtactcgattcagttgaaccgttaaatcctgatggaccaatccactgcttcttcaaaataactgaattcgccataattcgaccactgaatggagattcagattgaacaaactgattccccgcgaccatcataaaatttgaggcgccacttaatggatattccgtatcaattcgcgacttattcttaatcaccgtcccagttgcctgaactttttgctgattcacaaaacttatcgttgcaaaacaaccaattactaacgcgattaaaccatattttctttttgtcatatatgttggcccccagtcctaacttccccattaagcgctagaaggcacccccgagttattgtttttctagttctttgatttgcttttcatcttgcttcttacgacgacgataccctaagtaatacgttgtaattaataggatgatgaaaataataattagtagaatgattaaccaaatccaccatagatttttattctttcggttcatttgcattgcttggttaacactgatttcaaaatcacgatcgaaaacccaagttttttgactggatttcgcaactaaatgcaagtgatacttcccaggattaatccagctatcaccaagcggaatcccatattcaaagctagagtttgtcgccatcgtgataccctcacgttgatagccaaatagtgtcttagagcctttatgtttcgacactttagcattgatagtcatcgcaccgggtgttgctgctcgtacattttccaacttagctaatacggtaggctcatgcagatagtttgtttcactaacccgaatccgccgcaatttcagatttgccggtgtatgtatattaggatgttctcttaacactacacctatcgccattgcataataattttttacactaaaaccttgttggtctgttccttgcgtactacctgcctttgtatctttaaaatacagcgcaccctttagaacgcctgcatagagttgatctggcatctttaccttaaaattaactgtttttgtttctttaggtttcaaagtaatcatttgtggttgatcaaaaagctgactaaattgatattccgcctgtgataatttcccagggttatgcttatcaaaggcctctgttcctgaatcagttgtataacgagtattagctgcggcgctaatcgtttttgtattatcttctagattttcaatcaccactgataatgtttcggtttgatttggcttcataactaaatcaaaactagataacgcctcgttatattgattatcgggaatattagcacttactgtaaagccagcaccggctgcctggaccgtttgcatatccataatcaatggtagcaagaataatcctattaatgacaacattagtatgtgtaattttttcatgcgctctccttcacgaaaaaaagttgggtttccccaactttttctgatctaatctttaaaatttgataattaagctgttggtaaagttgtttgagcaccatccattaaagtccatgtgataggtgcttgataagttcctgccacaatgttctttaattcgctcaatttaagtgaagataccttatcatcagtagtactaaaatcagcagttgttgtttgagcacctaatttttctggtgtgttttcaagggtcttggcggtattcatgatgacttgtgcatctttaccaatggttgtagtcgttagattatcaacacctttaccaattgtgataacaccggttgcagtcccttcgctctttgtatcgatattcttagattcaccaagttgtgcgaataatgtccattcactaccagcaccacgataatcactcacttgtaacgtattaacatccttatcaatattaccttgcgtaccgtctgctggtgtagcagtttgtgcatggccatcattatgatgagtgctatcaacagtgttgcttgtttgtaagaggtcatcgttctttaagttattgatagttgttgtatcatcattaccaaaatggaaatcaggtgcagcatccaatgtcaattggccagccttaaccgtaaattcaacagtcgttgttgcttttgctggtgttgctttagtagctaccttatcactaactgttacggcttgtacgcctgcaacgttgatcaatgttgcgcttgctaatgtaactgctgctaataatgcgaattttgtttgtttcattatgaaattccctcaaatagttagttatttaatagtaattaaccctattattcatttacttctttaaggttattctaggtcataaatcctgaaaagataagtttctcagctattgttaaccttataaagcgcttatcaaattaatagctaaaaaatattgaatagctgctttatttgacgctgttcactatattcaaaattatgtactacgcgtgcatacggttctcaaaatgccgattattcaactttataactgttaatatgcttgagtagctgctggtaaactaacatatttatttattgcaaaaattacataatcactaatatcaacattattattttatttttttgaacccaaattaagcactagcctttcaaaccctttagagacactaacatatctgttatctattcttaaaattttctcactattatgactgttattttattatattacccattcaaatcattgaccttgctaacattagctgacaataattttattaaaaaattttagaaaaaatttttcaactttttttcgaatagatattcaactaggtaaacttttattatactagtattatttttttaatacttattggactgtaccactcctgtaacccgtcaattgtgagaacaatccttttaaagtcccatttgattcagtatactggtagataacagctattcttgggggtacttcaaatgcgaacatggcaaaagactatcattattatcctagcacttatcgcaataccgattatttattttgagaaccagtactttagccatcaacaaaaagaggctcaaattaaaacaagccaaacagcgatcttcaaagcttaccgaatccattccgaaaataattatgccaatttcgccatctacactgatacaaaatcggcaggaaaaatctactattttgtccccaaaaaccaacaaggccacgccattgatctacggcggcaacaacagcgcattggcgaacaactctatcaaaaggcactcaagcagaaacaaaaagatattgttgtttacatcacctacaatggcgacaacttgcacgatgatacctactgcttaacaccgactggggaagtctacagccgtgtcgaacatcatttcagcactaaattcggtaaattcaccgatcaattgggacaagaagcggtttataacctcgctaaccaaacacaccccgtgacctttaaagacttatatcatgatgccgctaccctaccaatgattaaacaactcgctgttgatcaacaacttaaaaaatacaactacacgccccaccaattaaaaaccttggagaatcttgattttccaactgacgtcaattatcaacagttctctttttcacagcacgggttaacgctaaacttttcaaaaaacacgctgggaatcaaacagatcacattgccactagcgacaatcggtccttatctaaatcccgactatatcgctgaaggctacacaatgccaagcgccaagaagaaatccaaatcagttgccctcactttcaatacggctcttgatacggacagtgccaagcaagtccttgaaattctcaatgaaaaagcggcacaggccacgttcttccccaccggtgaagcagcccacaaacatcctaaaacactcaaaaaaataagcgcggctaatcaagcaattggtaatcaaagttacgctgtcgatgatgcaatcgatacaatgagcgaagctgacttatcagcaaatcttgccaaaacagatcaagcgattttcaaagcaactggcgcactaccacgattcatgcgcgtaacccctgataccactaataaggccattgcgagtgccaaccaacgcgcgttgattagttggtcggttgactcagaagattggcgcactgatattaaagctactgatattaccaaaaacgttattgagcgcacaactggcggtgacgtcattctacttagaactgcgcctgaaacaatcaaagctttgccagctctcatcgatcaattgcgagccaaaggttatcacttagtaacaattccatcattatttgaacaccgtttagcacctttccaacagtacgctaaggccgctgatccttatcaagattaaaaaaaaagaaccccgagacggctgtctcggggttctttttttaatcagtattatcgacaactttatcagccgttgataattcccaagttgcttccaacttatatttgcctgggcgtttagcatattgatctgccttgccattatggaatttcaagttaacgtcgctcttataaaacggcattgacttggccggttgtatggcgtctaactgctcatctcccgacaactgtttttgtgtatccagtgttaacaatggggtttctggtccttttaataaaccacctaaatttaaaatctggcccgcttcccaatcatcatccgtccccgttttcaacgagtacaattggacgttaaagtcggtcgcatcctcttgcaacaatggattatcgacgagatccgcacctgaagtgctgttcttaacaactaatttccagtccatataaaatggattttcaacgttaatttgccccttagcaatgctgaccggttcttgttcagaggtgcctagtgtataggtcccaaaatcaaatacctttggatagttaaccaacaaatcaccatgaacattcaaggtgtaattagtaattgtattatcatactttgccttaatttcacttgccgtcatcgtcgacaaatcatcagaggcactagccacaataaacgaaaatttattcttatgcagtaaatgccaaccgataaaggccttttcgacgccattaaccacataattaccatcaatcttgccggcattataaatggtttgatcatcgtaattatcaacattatccttcgtctttaaatcttccgtgacgtcggcaatcgataattcgactgtctgagcttcactcgtcttattgggttgcaacggatttttaccgtccggctcatactttttccacttaccatcattcatccgcgaccataacacattgctggtcccagctggttgatcgattaaaaaggtgtttttaaaagcacgcccatccaaacgatgcatcgtttctgattccggatcgatttcaacgttattatttagtgaaaattggaaaacataattcgtcgtgacattttcaggactaaagttaacgccgttgggcagggtcacggacaaaatccgcggcactttggtcgttgattccaaatcagaagtccctgggaatttaccatcggcattaaagttcgccccaaacgccttatcaactgccacgttcccgtccagataaatactccgattcgtaataacattcccagcaaaactatactgagaacccccttgaataatgatgttggtatggggggctaaaatcgtcccaataaatgaataattttcttccgaaccacgattagaattcaacgtaatcgcagcgtcgtcaccaccattaatcgtattaaagttgttcatcacatgcgccgctgaattataacggaccttggtattatcggccggcgttaaatccaatcgagcattatactgtgctgttgtttgtggataatatttattatccaccggcgcattggccttaacctgtgccggtgtgtacgcccgcatactatacgttgagctggcactaaaattgaaagtcttaaaattatggaaattaaagataatatacggaatcttttgtttacccgccgtatagttcaataaattaatggaaatcccttccgctttttggaagaggccatcattagcagcaccatcaatatcaacaactgcgacaccaacatccgtacttgttgtatccatatcaatattaacttgaataacatttccgtttaaatcaacaccaagtgaactaccattaacggcttttgaattaagattaattgacttgattgcatcagaatgaacgtcacccttgtaaccagtgatattcccatcagcatcctattctgtcgccgtcaaattggcgtagtaatcactcacgttggtgacattactaatcgcttgagcttgggtactaactttattgtctttgaaatagtcaatatcccctaaataagcttttttgccattcaatcgataggcccgattcttgaaagctttcaccttattatcatcattcagaatactttttagttggctatctgggatatcatcgttagcagaagtccccatcacgtaatgccctacctctttattcttgccgaccatactatcgtctcgggcacaatcttcgtaaaagattttgaaaaagcagtcgctgagacaagggatggatctaagttggttggtaaatcaatcttcgcatccgtaaaattattaaccttcgaacttggatactcattcttatcttcagtatcgttaacagaagtcccaactaaaaaatgcccggcataaaattcgccttgcatgttctgcgtattattaccattcataaccatattttcgccggcaaagattgtcgcgtcgctggcaacccctaatggataacgttggctaggccgttcgattgttttattcccaattcgaatcaacccactgttattggtcgccgccatacttttttgtagcggcattaagcaaatcataaaactaagtactaataaaggctttaatatcgtcgttatatttattttcatattgttcctcaattaaattctcaacggcgtcaactagtttcatagtatacgacagtacgtgtatagtcaataatataaattgttatagactttatcttttcattttagtgtggcattattttaattctagagagagatattatgaaagaaggcactattttgaataaattggtaaaaatgttaacagtatcatcagcaacacttatgggggttgtcgggctaagccaactaacacctgttcacgccgcagatacaacggctaaatcagtgggaacccttgaaattaaagacgggacacaaactttaacaagcgttgaaagtcttgattttggcgacgttgcatacgacgcaaacggcatgtcagtgcctttgaaaaagactggtgaaaaagccatcgtgaaagatacaacattttcacaagcagcttggacaatttctggtcaaacagattcaacggtcgctgatttaacaatcaatggtcaattattgtcagcagcacctgctgccgttttccataaagctgatgaagcaacattcggcgaacaaactgcaactgtcgaaaatgcgacaatggcattatctgctagtcaagcaactacgaatggtacaaaagcaatcagcatagatgttaactggacgcttacacctacaactcaaagtgctaaattcaactaatcacaaataattcatgaaaggtcgggacaattttttgtcacgccttttttaataccccactgaaaggacggttctatgaaaaaatcacttcgatttttcctcccattattactagcgctcttcttcttagcccctacaaaagcttgggcggacacagctaatttttcaattgaaaaggtcgacacccccgaacaaactaaagaagctgatttctatgacattttagccgaacctaatcaaaatacgcacctcatcgctaatatcacaaacgccagcgaccaacaatcgacatacaccgttacactccgtaacagtgtcactaacaatagtggccaaatcgcctatgtgccaaatacaaaaaatactagcggccaaacactcaaccaattgagtccgaccgccgttaaggtgacggtccccgctaacagcaaaaaagatgtgacgtttcccatcaaaatgcctgcaacagcgtattccgggattattctaggcgccattcacgttgaaaaagagacagcacaacaaaaacaaacaaccaagaaaacccaaattattaatcattacgggattgaaattccggtcgtcgttcgtaccacaccttcttcaacaccagacaccaaactgcaactaaaaaaggtgactgctggtttggacacgaataaccattctgccgtactggcaaccctttataacgaaagcaattgggtcctaacgccgcttaaagtagacgctaaggtttaccgcaagtcaaaccacaaactactttacagcagccataaaaaaggcctcgagatggcccccaattcaagtttcaattatgctatcgaacctggtgatgaaccgctcaaagcaggtacttacacactagacatgacggctaaatcagataagaaaacttggcattttagcagcgagtttacaatcaaacgagcaacacccaaagaaaacgccaaaaatgaattgaaatcaccagaaaagaagaaaagtattaacatcatctggctgattgttggcttcagtatcttattactcatcctgattattctttacttgctctacaaactacgtcaaaaaacaaaagaacaataataatgaaaaggcgccgagacagttgtctcggcgccttttttattatctaacgatgtttactaaggtctactttttctaatggaataacctttgttttatagcgaatcttgtaataactgtacaaaatgatgaacaacggaatactcatgtaactaatcccgatcgctgtccaatcaaagtgggcaaacgcttgaatatcctggccaataatgacaatcacacagagtaagaaagcaaaaattggcccaaatgggaaccaccgtgcgtggtatttcaattctgacaattgatgaccttgcactttaaaagcgcgtcggaaacgataatgcgaaatcgcgatccctaaccaagcgatgaaaccagtcaaaccactagcagccacaaggaaaagataaatgcgagtgccaaagacactggtcataaaggtcaaagccccaataatcgttgtcccgatcaaagccatgactggaataccgcgtttgtttgtcttggcaaaaatcttagcggcatagccgtcttcggccatcgaccacaacattcttgaagaagcatacatccctgaattagcagccgataacactgacgttaaaataactgcgttcataatgctggcagctgatgctaaaccagcacgtttgaagaccaaggtaaagggactaaccgcaatgttggtttcactagcacctaataatgaggggcttgtataaggaattaaacaagcgataacgaagattgataagatgtagaataataaaattcgccagaaaacttgtttgattgcctttgggatactcttttcaggcgtcttcgattccccagcggtgatcccaattaattctgtcccttggaatgagaaaccagcaacaacgaacacactcaacatcattggtaagccaccaacaaatggcgctttcttgatagtaaagttgctaaggccggtccgatgaccacccatgataccaaaaatcgttaagacaccaacacctaagaaaataataactgtaataactttgattaatgcaaaccaatattcagtttcaccaaaagatttcacactcgtgatattaatcaagaaaatcaataatagcgcgactaaactaaaaatccagcccggcatatccggtaaccaaaactgcatgactaaggctgcggtactgacgtctacggctaacgtaatcgcccaattaaaccagtaattccaaccaagcgcaaaccctaatgctggatcaacaaaccgcgttgcatacgttgaaaacgaccctgaaactggcaagtaagttgccatttcacccaaactggtcatcaagaagaaaaccataatcccaatgccacaataagcaagtaacgcgccacctggacccgccttggcaattgccgacccacttgtgacgaataaacctgtaccgatactaccacccaacgcaatcatcgatagatgccgcgtctttaactcccgcttcatttcattttctgccatactacttctgctcttttctccattatttcaagaaaatcgcaccaacccgcgaatttagcaaacaaaaaagccttcttgtctgctaaaaacgacaaaaagactataagccttatattaaccgttgatagcgccccgtaacgtttcgttacgacagtccttgatttattcaatcaagtcccaacatcaatttgaataagcaaattgacatttcggcaaattcccctttaattattcctcatcactgcttagtcagttcagaataacgactgatggtttttgcgacctcttatcttgttaaaggtagtatatcgaattaaagcgcatccgtcaacattgggcgcaatgcaaatttcagctaaaaaaagaagatcgcctactggcaatctttccattttaattattattcttcagtcttgtcttgcttatttttccgccataataggaagagtaagaacaagattaagagtaccatgacaccgataatcacgtataaccaccagttactttgtggtaattcaacagctttaccgttgcattttctggcttctttttgtgtgatttcaaaaatccttcgacaatagccactgacccttgttcgagttgcctttaatcttaatattataacgaccagccttcagtggttggttttttaaatcaatcccgtaatcaaaattcgagttgggtgccatctgtaaatcagtttgcttgctgtgataaagcaccttactttgtccagcacggcgaatcttagcgtcgacttgcatctcaccaactgagtttgcttttgtattttgaatatttgataaaatcgcagtgtgcccgttcaacaagccaggtttaatccgatttaaccgcaaatgtggtttcacagtttgatcggattgcgttaacttaacgcctaagatataagaatagcggttcgtcaaagacgtgcccttcttatgatctaaagcttgttcaacttgatcttgcttaacttgtgagacataaaacccgcctaaaatggtaccttaaaaagtcgctttaggtgcattcaaggtaaaagttgctgtccgactactttcagcaggcaccttcaagcgttgcgctggcgacatcaatttagtaaatgggtattttaacgttttatcgtacttaggatcggattgactgtaatcaatcaccccattttgattggtaattgccgtatttggtgcgacatctacttcaaggtcttttttcccagtattttggacgacgaccgatacttcctctttttgaccaggtttcacgcccaaatcgtaatagcctaaattcttatccgtttgattttccggataaatcggtgcaactgagtaagttaccttttcggcatgaacaacctgttgattgacagtaaatgccacaaacaacgttgccagcacgcccatcactaatccaagccattttttaaagtgtgttattttctaatctcctctatcttaaggggccggtgtattacctaatgtccaatcaatggtccctgtgtaatcacccgcataggccccagcattcacttttaacaatatcccttgattatcatcccacttaatcggcgtaatgtcatcatctgatgttgttgttttagaagcaattctttgagggatttcggtgacgtctgttgatttttgaccatcaacataaactagaccaccatctaactgtttgtgatctgtcgtccgtgtcaagcctgttgagctggcatataaatcccaccgcgaaccggtaccacgtgtatcagccacggttggtgcccaatcagtattatcacgtttattaatcgtatttttgccaaccgttactggcgcaaatccaatttcatttttaaccttatctaatagaagggtaccaccttttagtttaaagtagattgtcattactgtcgatttttcgttgtacccagcgttggtcatataaagcgttaatttatgggtgtcgttcaacgataaaccaaccgtcggaatcccactgactaacttaggaccgacattattttgcgcgatggtcttttctgcaccatcgtcaattgcataatgtaatgtcccaagcgcgtgactatcaatcttaccagtcgctgatgattgtgaccaagagcctgttaaagcaattggttgattcttatcaagcgcaattggtttttcctttgttgggtcagtccactttttatctaagacaagcttagggagacttgtgacgtaaacggccttttctgtcgattcacgggccatcttaccatctaaactgatttcatagttccgacctaaattggtcgtcccatcagttggggttgggtcaaaagcggttagcgtaaactgaatcttagacgtgctatttttggtaacgtcacccatattaaccccagtactaaaggtatttttccctatcgtaccaaagaagtcattttctgtcgcatcgtgcggtgtcagtgtattaccgttcaaatcaatagaaggtgttttgaaaagacccgtcgacaccttattcttcgatactaatttattattgatcatcaaatcatcggcaacataggagaccccctgagaagtatccgttccatcagtcttatagcgtacacccacttgtttccaatcagaaccactagtggggtcgttattaattgttagaaccccttttaactcttctagcggtttcgccggattgtccttcgttacttcagcaccaagggcattcccatttttatggtacactttgtaattttgtgacgtaatcggaatattcgatattttttttaaaagccacttggttcaattcgttactcttaccagttttacccgtgaaaccccagtaaacttgcgttgttccaaaaatattattgacaataattggtaccttaacggggtcttgaccatcaaatttataggtcaaagtatgatcggcataactccacttgacattaaactcatgccatttaccatctgatccaggaaattccttaacatcattatgaatcaaacgaattttagaacctattatcccgaaatctttataactactggttaaagccggataattccatgcgatatgatttctaactagtggtttactcgtacccaaaatacctgtcggtgctgaaccccaatcatcattatgtcctgtatcaaactctactgcaaaactcttcttaatagctagactaacatccacactacttgcactaccccagacacctaactgctgccctgttccgcctgtttgaattgtattgtaaccacgtggatcagcatgcatcacaaaagccatcccgtcagctgcattactgccactatccccaaagtttaagagcatcgtcgcctcaaaatccttgcttaaatcaatcctgttatccgggttagaccaaatagcccccgactgatcgttggcggctggattgatgacagttacaccatcaacaggtaattcactgtcggattcctttagtggtggtgcgaataaattctcaatatttgtaatatgcgctggtactgggtcaattgctgcctttgttgggttaactaccaccaagattcctagcaataaactaatacctagcactaaaaattgtattgttttattaatacgcattgccagtcctccttgagcagcttttctcaaacgactaattaactgttacctcaagtgatttcgactgggaaatcaactgaggtaacagctcattattgagctgttactactattataaccattgtaaaatgctatctcaaattaagggttaattatgcttttggtgttgcggttaatgtccatgttaattgaccagtatagtcaccagcgtatgcgccagctaaaacatggagatttgaaccactaatcttgtagttccagttccctaacccttgatccttaccagctgtgataatatttttagcactatcattcgttaaatcaactgattttgtatccgctacagtgtgcgctgcgttatcagtactgataccactcgcattcttcaatgttaatgttgagttttcaagtgtgtgactgcttgcatctgtgaacggtgttgtaagcgcaacgtcaactgtataaccagcaccagtcccacgcgcatcagcaaccgaaacagtgccatcagctgtttgacccaaatctaatacagaggctgtaatttctttagtgccaaaatctaaatcaggaacagctgtaaatttaaccgtatcgctacccgttaattttgcttttacgacagaagtgactttttgaccatctgttgcgatttcatttttaggagcatctgctgcgaaagccgtttgccctgaaatcattgctgcacctgctactgtcactaaaccgcttaataataatgtactaatcttcatcacaaagacctctattctttaatttttcttttatcatctaattaacatcatcaaaaaattcagcgttctcaccatctaacccgttgaagggtaacgctattaaccttttcgggattagtatatcacccccgtaatcgattgtaaacaacttattttcaaaaacatttaataatataatcatttattaaataaagtataagtaatatccactatctaaaaattagtgaaaatcagaaatacttatatatcaacaaccgtcacctgattagtgaaaattaattttcattattttttgtaatttcagcaaataataatattttattttaaaataattggacaatcgagctaatctcagcaactcaaatcactaaattttctgttaaaaagacaaaaaaacaggctagaagaagggttcttctagcctgttttaacttagtaagtcagtttactttagatttttaataatcttttgaattaataattcacgttgttcagccgattggttccaatcaataaccggaatatcgggatgccccatcgtttcgataattaaaccggagacagtttgttttttcaattcattggcccacaacatgtccgctttatgaaaagcagcattaataatcaatgtcccttgtttagccactggttgaaaatcattaaagactgtatctaacttaccggtatctggatacgacttaatctgaccttcagttgccaagacaacatcgtaaattgatacttcactggcaggtcttgctagggtaaagccaccactattccctgaaacagattttacaagaccggccactactaacttacgaataattttccgtaagtaagtttgtgaaccacccagacgatgatgaatcacttctgacgaaatcgtatgttcaggatcttgggttgccaataacacaataatgcacgttgcttgttcaaatgctcgtgtcagttgcatattagtctatctccttttaacaaacgtccctgaagcctcacctggggccgcttttacttcaaatccatatttagttaaaatgtgttcgactttgttgaaactctcgcgatcaaacgtactgatattgccatcgattgtttcaatttctaatttgttggctaagttacaaaaggccttaactgccaattgcgccaatcctaagttttggtaatcataaactgctaagcgtgaagctgcacccaatgtttctaaaacagtgatgtgcatttcatttttccatttgttggtttcaaacaagagttgtgcttgaaaatcaactattgaatgtccaaatttatcaacattcgcatatggtgtatacacaaaaattgagttcgttgattctcgctgaccaccttcacgatagtccgtatagacaacatactgtttaaccccatcatcgctggtttgattcatgctagataaaattgttaactttgaatctgcctcaatttgcgctaattttcttgcaaaggcttgatcattttcacttgccatctgataacccccatttgtctttcaatcccgattataccacaggttttccaatttaaccgcgctttttaaagggttctcatttcaattgtgatttttttatcgaaatcctttttcgcctaaattatattggtaatattgcactaactcgccccctaaatagtcaggaagctgcgtttgataagcagtggtaaagcccactttttgtaaacaacgagctgatttttgattggtaataaaacaagccgccataaacttcgtaatatgcaggtcatcatgataagcattcataaccgcagataatgagcttgtcatcaggccctgtcgctggtattgcggcaaaatcgcaaaacttagttcgtacgattcaacagtgacatcatcttgcactaggtttggtgccaacatcattagcccacaaaccgcatctgcctttttagacacaattgcccatgaatgttcatcagactggagcatcgtcaaaaaagattgcgcttcatgctcagattgaaacggcggcatattgagttgcttcgcaatttctttttcgcaaccaatttggtagaccactgctaaatcgctagcgataaaatgtcttaattgtacggcttctgtttgaatattcaaccgatcctctccttttgaaattcctaccttttataatacgttacttacttgtttccgccaagccgttttttatatttgtcttaagaacaagcatattaattgtggtagaccactaaatattttataattgtagccatcaattcctattgttagaaagatggtgttcgtatggcgttacgtgattactttcatttattctcaaccgttccagaacaatcagaatcttacgattacatccttcattttctagggacgaccattccggatttgcgcgattatcccgatttaaccaaaatttgtgattgggctgcttacgacgatcacagttttagaatctggaccagtttacctttggatgaattcgaacaaaaattggcgcaattaacaccgctaaacgaaagagattaccaaattgattacagctataattttaaggatattaatttcttctaaaatttacgcttgacttttagtcgttcctgccgtaaattgattaacaatcatacaagtcatctcattcaaaccaagtaatgctttatctgtgtgtcaggaagtcggtggttgctgcgaaccgaccagggtaaatgtcgtgaaatactgaatgaagacttcggctaattaacaggaccgttatcccctgtaagagtggcgtgttggcttaaattggcgcgctaactgggtggtaccgcggtttccaatcgtccctattcgcagatgcgagtagggactttttttatgcaaaatactattgaaaaccactttcaatagcacgtttcaactaattttaactaaagggaggttttttcatgttaaagcatcttgcatgtggtggtattcttcgttatcagtcctatgacgcacaacttcagataaaacttaaaaaggatgcgttaatatgtcaaaaaaatcaattagtctattcgaagcaacactagttctcgtgattctcctagccattatggggaccggcgttattattttccaactttctcctcaaaccccggtcctcactgggattgccctgctgatgttatgggcgcggtggcggcattttagttggggtacgattcatgaaggaattgaggaaggcttaaaaagtggtctaattcccatcattattttcattctcgtcggtgccttgatcagtacttggattgccgctggtgtcattcccagtttaatggtttggggcttccagatggtcaatgtccactggtttattccatccattttcgtcgtttgtgccctcgtggggagtgccattgggagtgcctttaccgttatttcaacagtcgggattgcctttttcggcattggtgccacactgggattagataccacgatcgtcgcagctgccattatttccggggcaatatttggtgataaatcttcacccctctctcaatcaactaatttaacggctgtcgttactgaaacagatctctttgcccacatcaaaaacttaatgtggacaaccgtaccagcttttgtcggttcattagtgctatacgcgattatcgggcatacatctcgtgatattccattgaccaaaatcagtacaacagttgccattttaaaggcgcataccgacgttagtctctgggccttactacccattattttaatttttgtctgtgcgcgttttaaaatgccagccattccaacgttatttttaaacatcgccgtttcgatcggtttaatttttagccatcatccccacacttcttttaaaacaattgccaacttgattgaaaatggcttcgtcgctcatactggcaatcaaagtatcgatgcacttctcacacgtggcggtattaatagcatgttgagcacagtggccttaattatcatgacgttgaccctaggtggtctattgatgaaactcggtttaatccaacgcgtgatggcaccccttgcaactcgcctcaaaactcctggtcaattgatcagcgcggtaattgcttctgggattggcgttaacctctttatcggtgaagaattcctttctgttatcctgccaggtaaagcttttaaatcaacgtttgaaaaatcagatcttagcaacttggcgcttggccgcgcactcgaagatggcgggaccgttattaactacttagtcccttggggcgttgccggcgttttcgccgctaacaccctcggcgtaccaacactaagctacctgccattttgtttcttcagtatcctctcaccaatcttctcaatcttgagtagttttacagggattggcctcaaaaagaaaagtgttactaattaagcaaaataaaagaggttgcgacaaaagtaatttttgtcgcaacctcttttttgaattcaaaattttatacctgaaacgtgctttttgaaactgccgtctgtgcttagcgtctctcgtcaaacaactgctgacagcagttatccgccgagttatgctaatgctcaaagccaaaccgtttcaaacacactctttttcaaacgtgctctttcaggtatattgttgcagttagcaacgccccgcaaacaatcgactgcgtcgcttattcacgtgcctaggctaagccgctacaatataaccacctgaaacgcactctttttagaaaagattcatcaagaattgcccgccgtaaactaatgcaaagctataggctgcaattgatgctggtttgcataagatgataatccatgtgaattttttaaatgacatttcggttaagccagccattaaacataagacatcatcgggcgcaactggtaggaaaatcgctaaggcgaaaaagcgcgcaaagtttttcttttccgtaatcgtaccgatatatttatcataagttttctcgttgatgacgtggagaataaatggtttcccaaactggcgcgccagcaggaaattaaaaattgacccaatcgcaatcccgacatagttatagataaagccccataacgggccaaaaactagaacacctgcggcggtactaatcccgcccggaatcaccggaatcacaacctggataatctgaatcgtgatgaaaataatcgggccgatgagtacggagtggcccaagtacgcttgtaaggctgttgtgttgttaaaaagccctagtcgtgaccagtaaatggctaatgcaatgctcccaattagggccatcagagaagtcgtactaattaaacgtcttgaaattgttctgctcatccgccgaattcctttccctcgataatgtatctttaatttaccacaatttaaattccgagtagtccgccgatagtctgatttaagaaatcttaactttttagtcgctcatcctaaaaatgtccgaaaaggttttaatccttgtgcgcgatatttttcaacaaactgagcaactgccttaggatcctgagtttgatcatcgattaccaattgttccactggcaatggccgttcgttagcaattttgacatcaatcacaactggtccttggcgtttttgagctgctgcaaaagcagccttcaattcatctaacgtccggactgtaaagccttgggcccctaatgctgttgtggcggcaccgtaatctgcaccctgaatggcaacaccagaatgtggttgtcccttgtcatcttgttctgcttcaataaagccaaatgaatcattactcaacacaacgttgataattggcatttggtatttaacttgcgtaatcaaatcttgcatcaccatcgtgaagccaccgtcaccactgattgaccaaacttgccgattagggaaggctgcttgcgttccgattgcagctggtaaagcagcccccatcgttgcgtaccaagctgagatcgtcgtcttttgacctggtttcatcttcaagaagcggatgccatcaatcgtgacattccccacatctaagttgaaaatcgcgtcattggtagccatttgattgatttctttaaagactggttccacccgtaatggtgtttgtggatcatcttcaaaactagcggtccattgatcccagttagctttattagcggctgctgcacggtagaaagctgtcttttcagataccggttcactagcttcaagtaaagctgctaacgctgtcttagcatctgctaaaatgccaacgtcaacatggtgtctatggccaagtttggttggatcaatatcgatttggatgaacttcgcatctggtttgaagaaatattgaccaaattcgtagttactgccgacaaatagaattaaatcggccgcttctgccaaatcaacacctggtttagtggccacccgccctgctgaaaccatgtaagccgggttttcgtcagcgacgatccctttagagagggctgatgacatcattgggatacttaatttatcagataacgccactaattcgtcgccggctgccttagcaccttgaccaaaataaataatgggttgtttagcttctttaattaattgtaaagtctgttgaatatccgttgagcgaggttctggataattccccatctggaataggttagcagttgcttcgaagtgatcttcaattggttgccagcctaggtccgttggaattgtcacaaccgccacaccactatttttataggcttgttgaatcgcttggtcaacaactagtggtaattgttctgccgtcataacagtccggttgtagactgctacatccgcgaacattggattttcattcatttcttggaaataatcagtattcatgacaccagttgctacttgaccaactagtgctaaaacaggaacgtgatcatacttagcatcataaagcccgttcaataaatgaaccgccccagggccagctgacccgaatgtggccgcgattttaccagttgccttcgcttcaccagaagcagcaagcgcccctacttcttcgtgacgaacttgaatataacgcataattgctttttgattatgcaatgcattcatcgttgaatcaaatgagccgccaggtaacccaaaaatatggtcaataccccagtctgccatgacttttaacattgcgtctgccgcatttatcttttgtgttaccatctaaaaaggcctcctgattaattttattccgcttattttaagtataccgtcttaattgtaagcgttacaaatgataagcattttttagccgttttgactggtaacgaatcatcttctttggtatgcttgcatcaagctagataataatgattattaataagtggtcattaactttagattttagggaggcttttttaatggctattattgctaaagatgcacaagatgtttttaaagatgcgggcgaaaatattattttttcaacacttaatttaaatcgccagaatttctcatcagacagagctgccgtttcagatttggctgaacggatccccgcaattatcaatagtatgaacatccgctatccggatgcccatttacgcgttgcttttgggattggctcagatgcttgggactatcttttcccaaacgcccctaaacctcaagaactagaacccttccaaacgattcctagtcctaaacacgatgctgtcgctaccggcggtgatttattcttccacattcgggccaaagaaatggctgtttgttacgaagtaatggcgcaattcatgcaattcatcggtcaaaatgcaacaacgattgatgaaacccacggattccgttatttcgaaggccgctcaatcatcggctttatcgacggtacggaaaatcccgctatcgatgaaacggccgaatatgcccttgtcggcgacgaagaccctgaatttattaatggttcatacgcctttgcccaaaaatatattcattcgatggacacttggaaccacacttcaactgaagaacaagaaaaaacaattggtcgtaaaaaattctctgatcttgaattagacgatgccgaaaaaccaacaaacgcgcacaacgttgtttcgcaagataacgaaggtggcgtcgaacataaaattgtccggatgaacgtgccttacgctaatcctggtgaaaagatgactgggacttattttatcggctacgctcgtcaatggacaatcgttaaacgcatgctcacgaacatgttcgtcggcaaaccagccggcaactacgatcacctactagatttcagcgaaccaacaaccggcgtactattcttcatcccatccaaaacactactagcaaaaattgcggaagaagaaatttagagtgcgtttaaagcggtttgacgctgagcattagctgagtgttgggaataaacgccaaccttgaagagcctgggacaaaatcaatttttgtcccaggtcttttttgatgtccgaatgacgacacacttccttttttaatcgctttttgttgacttcccgcataccgattgctaaactgatgttacttactttaaataagaaaacgatgaggtgttttaaatgtcagatactatgcaagctgttgcgatcaaccaatacggcgatgaacaaacacttgaaatgatcactttgccaatgccaaccattggcgaacaccaagtactaattaaatcaaaagcaactgctatcaacccccttgactggaaattacgtgcaggttatctcacaagcatgttcgattgggcttttccaatcgtacttggttgggatttagccggtgtcgttactgaagtcggttcagctgtaacagattggcaagtcggcgacgaagtttttgcacggccagccacttctaatcgcggtacttatgctgaatatgttgctgttgatgacgaattagtcgctcgcaaacctaagaacgtcacttttgaagaagccgctgctgtgccattggccggcgaaaccgcttggcaagcccttttcaaccacggccacttaaaagccggtgaaacagtgctcgtccaagctggttctggtggtgttgggtcatatgccattcaattcgctaaggcaatgggcgcccacgttatcacaacaactagtgccaagaattttgatctcgttcgcgacttaggtgccgacgaaattatcgattaccgtaatgaaaaagttgctgataaagcacacaacgttgacctggtcatcgatacaatcggtgggcaaagccaagttgatgcttggtccgtgctcaatcctgaaacaggtcgccaaatttcaattgttggtgaagcacccgaaacagctgacattatcaaagacacaaagatgactttcaaagcaatctggttaattccaaatggtgaacaacttcgtgaaattgctgacctaatggctgacggtaaagtaaaatcaattattgatactgtcctcccattctcagcggaaggcttaatcaaatcacatcaactaagtgcaacacaccattcaactggtaaaatcgtcattaaattctaaatagtacaaaaaagcatcgccaagttggcgatgctttttttaatcgtgaaagagtttatcactatcagaacccgttcgattgccaatcacaaatgcttctaagatcacaaaaatcaattcgattgccgggaagaaataaatcgcaacaatcaaggccacctggatcatccagaaataaggcttcataataaccccgtaaatcggcatccctgtaatcttttgataaacctccggtgcaacttcgcggttggcatccgctagtgcgcgactcaataggaaatacatcatcaaccaagcaaaatgaaccacatagtagaaatattctgggccccgtgaattaataaaccgccccgcccaagcagtagcaacgggtaaaaatgacatcgataataaccatatattattcaaccaataaattcgttttgtcacccgtttcgttaaactaaacatgtagtggtgattataccaagcaacccctacgaagagataggttacgatataagcgaagaagtatggtgcattttccaataagccttcatctcagccgtttctggtgttttaaattcaagaatcataatcgttacaataattgcaatgactgcatcgctgaaagcttccaagcgacccttattcaatagaatccctcccaaatattaatagccattttatatttcacactattagttagcacccttatcattttaccgccattaaaaggatttgtcacgacctccctggaataatcaaccacgttaatcgatttatattgctttccccctttaactaatagtataataacttaaactttagggggggtttacaaatggataaaacatacaaatcaagcgctgaattaaagcgcgaggctaaggcactctatgcgggacattgaggccaagcaatcaagcttaatatcgtcccaacgctcttttcaattctcacttttatcttaattggtggcctctttatggcactcactgcactcttcataacatcggactttgtctcatcaggctctggctcatttcctagcaatatgtcttctggtaatttgttgactggtaatattggtagcttcatcgttggtttaattactttggggatttcatttacgacgctcgattggattcgctcaaaggatgctgactttaacgcttttagtggtgcttttagcgtcttttcaaaacgttattttgtcggagctgtcattactgaactattagccggctttttcaccgtcttatggacattactcttcatcatccctgggttaatcaaatcattttcttattctcaagcgcctttcatcttcaaaaatttaacggacgctcacccagaagccgatatcaattacctcgattgtattacaaaaagtcgtgaattgatggacggtcacaaatttagattcttcatcttaaaattaagtttcttaggttgggatatcctggccggctttaccttgggaattggctatatttggttaaatccttataaacaagcagcttacatgggcttttacgccgacttagtggactagcatactgaaaggattggcgattgccaatccttttttgttacccttaatgaccgaaacggctaaaatagagaagaaaggatgtggcatcattgatttcaaacacacagatcaccctagattctcaccaaaattggcaaactgttactactcagattccaacacctggcgaccacgaattactcatcaaagtccaagccgccgcagtcaatcctattgatctcaaacggcgcgccgttacaacgcatattttaggctacgatggttacggcgaagtcttagcaattggcaaaaccgtcacgcaatttaaagttggtgatatcgtctattacgccggttctactcaactagacggcagttttcaagcctaccaatgtatgaccgaagctctctgcgcactcgcccccgaccaattatcagcgagtgaagcggccggcctgccgctagtctcattaactgcctacgaactactttttgaaaaatttcatttcgaggctgcagaacaagcccacctcggtaaaaaccttttgattattaacggtgctggtggggtcggctcaattatgagtcaactcgccaaatgggctgggttcaccgtttatgccactagcagtcctcaaaattttaactggctaaaagctaatggcgtcgattatcctattgattaccaccaaacaagtgaccagcttaacctcgatcaactgccagccgaccacttcgacgcgattgccgttctttacgatgtcgcaccttatttatctgccgcaacacgcttaatcaaaccactcggtcatgtcggctcgctggttaatatgcaagccccacttgatttaaccccactgaaagcaaaatcagtcacatttgattgggaatatatgtttactaaaacagattttgattacgagattgccagccaaggcgcaatcctcaaaaaaatagcgcgcctcgccgacactaatcaaattcactcgattacgacgcaagtctaccaaggcttatcggttgaaaacctcgacacaatcacaaccgaacttacaaaaggccacgcaattggcaagtatgtgctaacctactaaaaaaagagctagcgacaaaaattacttttgtcgctagccctttttttagtctaataagccatatttaattttaaaacgttgaataatccgataccacgattgataaaaacaataaataaagaacacgttcgatagtgcatgggctagatcgaaataaaaactcgcaatataggctgcgatgaatgttttgagcgataagggattaacataggcgataaaataccataagttcattacccacccaaaaataaaaccccaaataaagccgaataggcaaagccaatatttattgtgggcccaatcaaagcggctaatcagcccggctgtcacgcccatcatcccccaacaaaacatctgccacggtgtccacggcccttgacctaagaagaaattcgaaaccaaggccgccgttgaaccaatcatgaagccagcttccggacccaaaaccaaagctgcgacaatcaccacgaaacttgttggttgaacactcggtagcggcgcaaaagggacccggctgaccgccgcaatcgtcgctaaaacggcaatcatcacaatttcacgggcccgaatttgacgtttttcaaagcgccaataaaatggcagcatactgaccactaaacaaataaaactcaacgctaaaaaatactgtccctgtaattggatgattaagcctaataaaaccgcgattattaaaaaggcaatcccaaaaataaggctactttgccagtcaatgcgcttcatcggtcaacctcttcccaagtcaacgccgcagagtcttgtggtcgtaagagtcgattaatcggggtggtgtaaaagaagttcgattggaaaaattggtgcggtgcttcttgcgcaacaatcgcgccatcaaataacaaagcacattggttcgcaaagcgagcgctaaagaccatatcatgactagccatgataatcgttaatccttctacttgtaactgctgtaataggtgtccaagtgcttgtttacgcaatggatctaagccttttgtcggctcatctaaaatcagcaacttcgggttagctaataaaataatccctagcgcaatcaattgctgttcaccaccactagtatcttgcggatcactgtctgctaaagcagttaggcctaacttggccagcatcgctgtggccgcttcctctggatgttcacgcccgagttgaatggcacgccgctcaaattcaacccggacactctccgcgctaaactggtcagccggttgttgagacaaataaccgatcactttaaataactgctctgtcggccacttttgtagcggtcgttccaacaagcggaccgttccgcgacggggttccaacaaaccaatcaatacttttaaaagtgtcgacttaccaatcccatttttaccgacaatcgctaaccaatcacccgtatggaccgttaatttgagctgattcaaaacatacggctcatttttggtatattgaaaatctaaatggtcagctgttaataatgtttcttgcatcccggctactaccggacgtaattgatcatgaatactgccgactggcaattgacgttgcccggccacaactgttagtggcacggattcagtctcagtggtcagttgttgttgccaaaaaagccgcggaatctccggcatgaaatcccgtaaagttggttgctgccaaattgcctgtagaccttgatcaactggtccttgataactgatgcagccgtttgtcattaaccagagttgattggccaacggtaacacatcatccaactgatgctcactcatgataatcgttatacccaattcatcatgcacgcgttgtaataagctcataaactctttggtcgcaatcggatctaattgggcagtcggttcatctaacaccaataggctcggttggagaatcaaaattgctgccagattaaccagttgcttttgcccgccagataattcatggacagatgcgtataaaatatcctgaatgccaagaaaactaacgagttctgcaattcttttttgaatattggcactggcttcgccgctattttccagtgaaaaggccaactcctgaatcacggtatccattacgagttgcttctcgggattttggaaaacaaagccgattttctgcgcactaacagctgggtcaagatccgccaatagtcggccattaaacgacacctgtcccaaacgctgtcccaccggccataattcccgtttaaattgacgcaataaagttgttttaccactacctgaagggccggccacaacgacccaatcaccagcattaaccgtcagattaatctcggccaagctcggctgatttgctaatgcatattgaaattgaagctgttctatctgtgcaattgccaccataagtactcccatccttccaataataatggtaacccatcaatcaacaaaatcacgcttagacacacccaatcacggctggttaaccgcaatgtacctaatgttggataaacgattaactgcccgttaccctgactggcgcaccaaaaggcgaataggccaccgctaatgagcgccatcaataggccataatcgcgatgcgtcatttgataacggcgatacgtacttcttttttgaacaccaaagccgcgggccgtcattgaatcggcggtctgcagtgcttcagtcagtgtattggttaataaaattgccaacagatgcatccctgcttgggcgcggttttttagccgccccgttaccatttgaatccctcgcgttcgttgcaccgccgtaatatcgcgtaaacgccgaatgaataatggaaaaaagcgcatcgtcatcatcgtcagtaacgtcaattgcggggcgattccgccaaataacgccaaaaatttatgattggtcatatgctgattataagtcacaaaaatcaataataaaacggccaaagcggtcgccattaaaaaaccatagaccaccgcttccgccgttatcagggtaccgccaaccgtcatcataacgtgcgtcccgtgattattgataattggattcatgatgacaatcaggaccatcatcaataaggcaccttgcagcgtgctaactgttttctgttgatttttggcgacccaattaaccgcaataataacgatcagttggccacataaaaagtaagggtgattgaaacacatcgaaaagctaatcattaatatgaagtacaccaataaaaccagtgggtgtaattgatcaataatcagttgcaattttagccctgaggcgcgtggcgatcgtgtccgagatcttccgtatatagccaatcaataacatctccactcttcacatgatagacaccacacgattgatttgaaaaaacgccgttgacccgatagagccaaccactctggggccccttatcgaattcaaacaagccattaattcctttgacataggcgctagcaccaatcccacggtaagataacggcatgccttgttggcccgttagccgttttaaaacggccagcactgtctcaccatcatcaatcgttaccgaagcatgattaattagggctgcattgccttcactaatcggcccataaacgcttaatgttactttttgggcagccggttccggttgtttgactggtgcttcgtgtgactcagcatgctgtgttgattgttgcgctgttgaaactaccgcactgcttgctgattgacgtgttattggtgtagcagtcgttgctgactgtgaggttggcgtttgtttagctgacgcacttgcctgttgttcttttttagcaacactggcttgttcaaactgactaacctgattggcttctttagattgtgcctgcttagaagcgacagaatgcttcgtctctttagccttagtcttagtaggcgtcttttttgaagtcgattcggcgtgcttgatgaccgccttgtgtgcgactttttttgattgcgtcgattgctcacttgcatgtttaactgtggttggttgctgttgaacactcgcataggtcccgtagccgattccacctagtaacacgagacttgcaacgcttagtagtaagcgctttttaaccatctagttgcctcctagcgttgttttaaacgacgtgtttggtaacttgcaacaccaagtaatatgaataacccagctaaaacactaccccaaacagattgatgacccgtttgtggtaaagcatcttgcgtcgcagttgtgccagtcaatggcacttcatctgcttcattaatcggttgtttaggtaattgtttatctaaatcaacttctgaagatgatgatgccgacgattcaccggctggctttttgccaggaatacttggctttggagctggcgctggctttggatccggttttggctttgggtccggttctggcactacttttttaaagttatagattgaacccttacccttcaataaataatcatattggcctaaagcatagaccgcttgttcggttgacattgataacgcgccatcatcgctgcccatcatccagcggaattgcccgtcggctttttggtaagcaattaagttcgtgattggtgtcgcacccttatcacctacaaacgttgtggctggattgacgccagctgcggccaagcccaagatcgccattgccgtgctatttgagttttcttcggttgaaaagccaccaggaatcaagaaaccacccgttgctttcacaaaaccagttgtttttaataaggcaactgcgcgatccaaagcgctttgaaccttaggttgatcacgatgcatgcctaatgctgacatcgtcatccccgtaatatccaaatcactgactgatccgaaaaaggcccaaccgccagctgtgttttgttgttttaaaactaaatcgattaattgattaatcgtttggttagcttgtgacccgtaatcttgggtgctaagggcaataatcccatatacttgtcctgtgataccggcagtagccgcttttttaataatttcagcaattaaattaatgccgttgaattgtgttgggtcttcgccaattgcagcgatcccaattgtcaggcgttccaagtcggttgcagaataatgaccggccattccggttaattcttcagcaaagacttggtggaacgttgctttttgatcggttgttaattgcgccccagaactgatacgggccaaagccgcccaaacttcagtatcctggctagttgttaattgttgcgccccacgcgccatagccccttgatagtcctgatttaaaacagctttagcagctgattttacaggttgattattggtcgtctgcgctgttttagcagagacttctgccacttgtgaacgtgaagacgtcccttgactctgacggcttgattcaaccaattgatcactggcaacttgactgctagttgattgactagcactgagttgacttgtcgcaactgattgctgaccggtttgaatatctgtcgcatgcgcactcgtcgcacttgtgacagctggtgctaataataataaactcgcccataatccggtatagatttgttttcgtttcatataatattcccctacccctacaaacttaacttttaactagttacttctattttaacaattttttggtgaaagcaacatctttttaaagcactatcattagattgacagattatttttcgtaaaaagagctcattttatgcgtactatcgtcacaatttattcaatatatccgcctaaactgattattattcagtttttataaggaggcatcattatgaactttttcaaacgtgcttggcaaaatatttcattcaaaaaaggccgtagcttattattagtcattgttatgattgttattcttgtcttcattatggccgggttactcattagaaacgccgcagtaacaacggttaacaacaccaaacaacaagtcggtgccagtgtcaccttatcggccaatcgtgatcaggccttcaagcaaatgcgctcgtcgacaccaccaacgagcacttctaaaacgaagaaaccatcgctcagcatgccttcggttagcttagccaacgtcaaaaagattgcggcattatccggtgtcgccaactataacgttagcgttgcaacttcggctaatgctgattccattgatgcgattagcacttcttcagctagcaataatggtccgatgggcatgtcgcaatccacctcaacaggcgatttcaaagataacaccaataaaattaccaaaggccgtgctttaaccagtgccgatgttaatactaacaacgttgtgattgaaagcgaacttgctaaacaaaacaatctcagggttggcgatacaattaagatcaaagccacaacgactggtaaaaaagcttacaccctcaaagtcgtcggaatttacaaagcgagtcaaagtagcagctcaagtatggggcctcaacaaagcgatccttctaatacgctttataccgcttataccttggctaaccaaattaaaggtcaaaccaataaagtcgacagtgccgtctttactttaagcaaccctactcaaaaaacagccttcttaaaagctgctaagaaaatcatcaacactaaaaaatttagcctcacagcagacgacagtacttaccaaaccttgaaacaatccatgcaaaaaatgacaaatttcgctaataaaattgtttggttagttgccatcgccggtaccgtcattttagccctgatcatcatcttgatggtgcgcgaacgccgttatgaaatgggcgttttactctcattaggtgaaaagcggactaagattattgggcaattactcgttgaaatgttcatgttactgattgtcagcttagcgctcgccggtatcggtggtcaatttgccggtcaagcactcagcaagcaagtcatgaattccgttacaacaaacaccacaaccgacagcgcaacaactcaacctggcggtaatggtggccctggcggcggtcaagcaccaagtggccaacctggtggtaatcgtctcggtggtcaaatgacccaaggcaatccaactaaagccaaagccattaaagcgagcgatttaaacctcaaaattaatccgttaaccttacttcaattaggcgcctttggtttcaccaccattgctttggcagtcttactagcttcagccaatattctaagactcgaaccacgaaaaattctcattggataattaggaggtcacattatgttaacagccaaaggtgtcagttattggtacgattcagaagaaaatacactctacaaagacgttaatctcaactttgaagccgggcaactctacggcattatcggtaatagtggcgctgggaaaacgaccctcttaacaatgctggctggtctcgacaaaccacgcaaaggtgaaatcctctatgaaggcacttcacttcaaaaaatcggtttgacgcaataccgcaaccgctatatttcaattgtcttccaggcctacaacttgctcccctatatgtcggccctcgataacgtcctaaccgcaatggccattactcattcagaacgcgaaaatcccagtgagtttgcgctagagatgctgactaaagtcggcatcaaccctgatatggctcgtaaaaacgttcagaaactatccggcgggcagcaacaacgggtggcaatcgtccgggcaatgtgttgtgatgcaccagtcgttgttgccgatgaaccaaccggtattttagacgacactaacacccgggaaataattaaactgttccaagagctcgcccacgaacaacaaaaatgtgtcatcctcgtaacccatgaaaaagaggtcgccgcgagttgcgacgtgcaatatctattgcagcacaaaacttttgaagaagtcactctctaaaatcgcttaaaataaactgtcgatagtaagctgaacggcagtttattttattgaaaattgttatactgaagctaccaaatggaggtgtcttcgatgaccacaatctattacgattatttaacgcatggcgatcaaaacctagtcgttgccgcaaccgatcacggcgtctgctttgtcggttcccctaaccaaccactcagtgagctaacaacttttatgcccggttatgacttacgacaagacccctcgaaactggcgccagcgattgcccaaataacggcctatctaacgcataagagaaccacttgggatttacccctcgacttcttaggcggcacgcctttccaacaacaagtctggtcggccttgcaggcaattccatacgggcaaaccgtgacttaccatcaactagccacacaaattgggcggccaactgcgattcgagcagtagcttctgctgttggacgtaatccgctactaataattgtgccctgtcatcgcgtcctccgtaaagatggctcattgggtggtttccgtggcggtttagcttttaaaaaacagttattagcgctcgagcactaaaaaaggtgtgccccctcggggggcacacctttttaaatcacttttttagcgttcttcgctacctaataaacgacccgtaaaggctgctaggatagcacccacgattggggctgctaagtaaacccaataatgagctagtgctgaaccaccagcaaaaatagctggtccaaaacttctagcagggtttaacgaaccacccgttaagttaagcgcaacgataatcaataagctcaatgtaatcccgattgccaatggtgccatttgactattgccaaaacgatcactagttgtcattaagattaccaagatgaaactgaacgttacgatcacttcaactaagaacgcaactcctgccccaattttaggaaaatcggtttgaccaaaaccggtccgacttaaatcaagcgcattgatgagaactgataataaccctgaagcgacaattgcacctaagaattgcgctacgatataaaaaacgccatcttttgcttctaagcgtttattaatcatcatcgcaatagaaacggccgggttaaaatgaccgcccgaaacgccaccaaaagcataagccatcacagtcactgttaacccaaatgccaagccaatcgttaatgtatcagctttagcaattacaaccgcaccggttcctaagaacactaacataaaagtaccaataaattctgctgcataacgtcgcataaataattccttctctctaacttgttgtgaaccctattaattatacagttaattgcttttgaatgcatcaaaaagggctcttaattcagggcattaagcaaataatttgatattatgctattaaaagcctatacttattaataatctaggcgtaaaatataggcttattttaccccttttaaactaagtaaaagagatgatatattacgcaagtaactgatgtctatggtattacgcatgataactgtaaactaatcgaaacagaaaattcatttacgcgcattttcttggcccaaggccctgatggtacacgttatacatgtctcttaccagacgctaaaccaaacccaaaatccaatcaacatttcgtctacggtaaccccgcagatgcgccatactaagtatcatcaaaaaagggccgccaactaaccgttggcggccctttttatttcccggggaattactcagcaactaaaatatccaagaataattcaccatatttttctaatttattctccccgacacctttaacatctaacatttcagtcagtgaggttggcataatttcacacattgaatacaacgtcttatctgagaagattacaaatggtggtacaccctgttcttcagctaaatcacggcgtaattcgcgtaagcgttcgaataactcattgtcttcaggcaatgttttttgaaccttagcagccattttacgtgacaccttttcttgacccttaagtactttgacgcccgccaacgtgatctgtaaaacgggatattgaccaccagaagcccgtaaatagcctgacgcaactaagtaatcaatcaaaccactgacttctttttgtgaatcgccccgcatcaaaccgtatgttggcaattcatcaaagcggaactgcataatcttctgattcttagagcccgtcaatacttgcgcgaccattactttgccgaaacgttcatccattcgcttgatacacgataaaaccttttgggcatcaattgtaatgtcttgtgattcgcgtgtatcaagacaattgctacaacggccacatttttcacagtcatcatcaaaataattgacgatatattgttgcaagcactgttgcgtgttggcgtattgtgtcatttcttgtaacttagcgtattcccgttgcttattttcatcgtccatctctgattgatcgatgaaaaaatgttggatttggatatcattgactttaaacagtaagatggcctcactcggtaagccatcacgtccggcccgacctgcttcttgataataagcttctaagctgccgggaatttgggcatgcacgacaaatcgcacattactcttatcaatccccatcccaaaagcattcgtggcgaccataatcggtttacgatcgtagagaaaatcctcttgattttgccggcgcaccatttcatttaagccaccatgatacattgtgactgccagtttcgctttttcaatcagcttcgtgagccgttcaacttctttacgtgtactagcatagatgatgccggatttttgcttattaacctttaaataatcgattaagtagcgatcactattttggtttttaaccacttgaaaggccaggttttcccgtgaaaaaccagtcttaacttcatgttgaatccctaagcgcaacataatatcatcagctacttgtgacgtagcagtcgccgttagtgcgacaattgttggttgttgtcgcatgcttttaattgtatccgttaagcgtagataactaggccgaaaatcgtgcccccattgcgagatacaatgcgcttcatcgacggcaatcaaatcaatcgttaattcggctaaatccgctaaaaagtaatcagagtccaaccgctctggcgacacataaagcaacttgacttcaccacgcgccgcttgattaaagcgctcctgcacctcaccttgcgtcaaggtactattgataaacgttgccggaatcccattttcgttgagcgcatcgacttgatctttcatcagcgaaatcaatggtgaaacaactaacgttaaccccggtaacatcagcgccggaatttggtaacataacgacttcccgccaccggttggcataatcgccaaaacattggtccctgctagtaaggattcaatcacatctgcttggccttctctaaaataatcatagccaaatttttcttttagtactgcttgtgcctgcatgccatttctcccacccgttaaaattcctatctactatcataacaaaaaaacaacaccgttgcggtcaaaataaaaacagtccctaatactaaggactgttctctattattaattacactgtaattctgcctcttaatcccactactgcccaaatcataatatttaatgagagcccgataaacggaaatggtgggtaaaaaagctgacgatcaacgtgataaagttcaaactaaatgaaacaagttcgccaattaacaacatatgcatattgtgaattgggttcgttttgatgaccaatcgtcttagataagcggtcgtgatattgaatagtaagacattcacgttatataacgttgaggcagctactgaatgaatatccgtccccaaccaagccgttgttgctggcaataatgatgtccagaatagtaataagatattcacccagataatctggccattaatttgcttcgcttgcgcaaacaaataatgatgattaacccacattgtcgcaataaaaataaaagtcaatacgtaggcaaaaaatttcatccggacatctaaaatcgccatccatgaatgatcatcctctggaagatgtagttccaatactaaaattgttaaaataatagcaattaccgcatcagtaaatgcttcaaatcgttcctttttcatcaattaatcactccttatttttttattcaagactagtttacggtattcattagctgacaaccagtcttttttagtgtttaatcaaaattaatgactcacgatggaggttttatgatgattaaactgcaagttaacttaaagaacacgcaaactgagattctttttgaccaacaaatactaaccatctattcggaacaaccggccacattatcaccgtttgacggcctactactgcatacaaaccaacaacaaatcacgcaaattgactatctcgctggggaaatcacgaccattccaaacggaccctttttaacactcactgatgcggactggcccgaaggtctaccttatttaggttgtttgttagctgaacaatcatcagcaatcaaaacaactgatttaccggcaaaagtccccagtaactaccgccaaactttacggccactgtttgaaaccttaaacttaattctagaaagatttggcttcaattggcagccagcgatggccccaaaagcaaaaccggccgctaaagcacggcaccgttggacaaaagccatcagcaccgtgccatttaccattgcaacgcgacaagcaaccggaaccgccatttggcaaaaacgaaacgaaatgtatctcaaagcgggcgcaacgttaatgccggaaccgcccctcaacaaggatggctcacttggctttgccgctaaaatgggtgcccaattgcgccatgaacacagcaatcaagttcaagataatgtcacaacagaggatattatcttcaaaagtgtcaatgaaattgggctatttctctactttggcggcaccaatagttggctagaactcattgatcaagatggccgctcaattgatgactggtcaaaaatttaagctaaaaggtggtttatattgttctattttttaatatgtgtattatatatttaattccaacagttaagaatactataataccagcaaataagaatagaaatccaataggtagtaagtagaaattttcatgtaatatacctgatgaatcaatgtattctactgaatttgcttttataaacaaacataaaaatccaattattaacagtattgaaccaacggtcgtggttgttaaattcattttagcttttcttgtttcactaccgtcattgattaatttttctgtcattttattcatagtaggtcctcctagtattaggtaatcaagtgaaatatgaaatttttcagaaattaatactataatttctagatctgggagatttctaatattttcccaattggatactgcttgtcttgaaacatttaattcatttgcgaatttttcttgtgttaggtatttttctttacgtaattttttaattttatctccaaattccattgtattaaattcctttcacttgtgtattcttaatataatgcgtgcgtgcttataattaaagacagtatagctttccatgcataaatgaaagctgtactgtctttaattatttggtaaataataaattatatttataaattaacataaaagtggcattctacgaagtctttacacccacatgtgtctcagcatggagttgcgtggtatagggttttaatgcccattcactaagtttctcaacatccgaaacttagtgaaattgtattttgtgatattattagggtagtcaattattttatatacgggaaggaagatcaatatgcgaattgatactagcaaatatcccactggcgacaatgccgttcaccctaaaaaggttagacgtttaaaaatacttagcaaggttgctactattacctgcattgctatgtatgtatcttatattccacaaattatagccaacttttctggatcaccagtttcgcctttacaacctttggtagcaacgattaatggttgcttgtggactggatattgatggtcaaaaacttataaggattggcccgtcattatagcgaatatcccaggtgttatttttggcttagttactgtaattactgtatatattcactaaatatcaggtgtcgaataacccaacaaataaggggtttcagtatatagaagtctgattattaacgtctgattataacagagctatttatcttattttgtgaaccatgcgtggtataggtatgaaatacccgtctaatgcgtttctcaaaactcaaagcttagtgaagtttgctgtttttgttaaccgaaaggctattagttttatagtataccgctgatatcagtgactttttcatttggcaaccaccatgaagggccacatccttgataatacccgttctgaaagcaaaataccgtcaatttaagcactaaggtgacagtcttttcagcatgacctaacacttttgttaaccggcgttaaaaacatcgctttttaacgttggtcagtatatgatacctttatcaattaaataatgaggtgttttcattgaaaaagaaaatgattagtctggtcgcgattgttgcgctcatcatcgtcggctttgccggttataactactataaaaatacttactagggtgacgttggctacgcccaagcgcccgctaaaacgcctaccaagcaagcgacaaaggacgatcaaggtaaggttgtgccaaatgaatacagttaccgttaccaactaaatgttgttaaagaagatggtacgcgaacaactgtccctgttgaaatttctagcgaaaaaccaacaccattgacacctaacagctacgtcaaattggaattcaattcaaaacgagttttatccggccctaataatatcgccaaagataaaatcccagctaaagtacaaactgaattagaaaaataactaaaaaagggctaaatgtttcgtgtgaaacatttagccttttttagagttgttttaacgcttcgcgttgcgctaatgccgataacgtatgtgtgtcgacaaaatcaattacccattccggattagtcttagcgtaatcacgcaaggcccacccaatcgctttttggatgaaaaattccggcgttgtttgatcgtcttcgatagcggcttgtaaatagtcaatgcgcgttgcgtccttgaatcctaattgcagaatcaacccgacgcggcgtaaccaaaaattctctttttgagcaaatagttgcccgacccattcaaattcagctggatgacgcttgatgtactcgctaaaaacacgtttccaaggatctacactgtcccatcatgctttttcagttactaattcggcaaactgcaatatatctgcacgttgccatttgcgcacggcccgcgccgcaatatcgattgcgacatattgatattcgcgcgcttcacgcgcataaagtgccttaacaatcaccatcagttctgccgctggtaactgtttcacggccggccaaaagtcgcgttcgtaagcatgtctctcggtcgctttgacaccgttaaaagtgaactgatcttgcatatatcgcgccatcgctgcttggttttctgggtgaatgggtaactcgaatatcaacatcatttgcctcctctacaccgttttattccaaaggacctttttatacggttggccttggccttctaagatcgataggctcgcgtttgccaccattttttgatcgcgaatagcactaaacggcacgcctaaaagggctcccatgacaaacaataaaacaatcccgtgcgccacaattaagacgttgccctctggataagcttgttgggcttggtcaataaccgtcatggcccgttttaaaacggcttggtaggattccgcgtgaatctgattggcatcaaataaatctggatggtggaagtaattatcaaattgcggatgcttttcttgcgccgctaccggctgtgcttcccaatcacctagcgccatttcccgtagtttaggggcaatcgttaacgccggttgcacaacgcgcgattgcgccagtaagtgttccgcggtcgtttgggcgcgttggagcggtgacgttaagatggcatcaaaaatttggtcgcctagataatcacccaagcggtctgcggccgctagccccgctggtgtcaacgcagaatcgaccccaccgccattgaaacactgtgctttattaatggtcgtttcgccgtgacgtacaaaataaaaagttgtcatgtttatccccactttcgtttctccattatactataagaaagctgacacccatttcaatcgcaaaagaggctacgacaaattttgccgtagcctcttttaatttgaccgccttatttaatattgacgtaagttaaatcaaacaagtgacttaaatcttgtaattgttctgaatcaacagcaaatgataaaactgtatggtgaccaccaccaacggttaaccagccaacggcaccttcgcgtaaaccttgttttggtgtccagagttgtttagcaactggcaagtgtggtgtatcagcttctggtttgttgccgcgaacatcatatgacatcaatttgaattcgtcgccataatcagccattgtgacgtccacagcatcgccttgcatccctgtgaagactaaacgtgcaggatcgtctttatcgccgatatctaatgggtgcacttcaacccgtggtttatctgacgcgattgaaggatcaacttcaagcatatgtgaccccaagatagcttcgtggccttgacgtaaatcaagtgtgtaatcttccatgaagaccgtcttttcattatgagccataatcttcaacaagcggtctaaagcagctgtcttccagtccccttcaccagcgaaaccataaccttcagccatcaataattgggctgctaaaccaggtaattgttccaaaccaactaaatcttcgaagttggttgtgaaggctgtgtatccacgatcgtccataaatttcttcaaaccgaagtagtcacggatttggtatttaacattgtgttcgaatttttcaggtgtattttgaccttcaacaaagtcgtattctttttgtaaatcagcatacttagcgtcgatatcagcctctgagacagcattgacttctgcgactaaatcaccgacaccccaataatcaaccgtccaaccaaatttgatttgggcttcgactttatcaccgtctgtgacggccacgttccgcattttatcagcaactgtcacgactttaatcttaaatgattcgttgtaagccaccgcaacgtccatccatttagccattgctttttgaacgtcttcatcaccccagtaacctgagataatcttgttatttttacgtaaacgcgcattgatgaaggcatattcgcgatcaccatgagctgattggtttaagttcatgtaatcgaaatcgattgtgtcgtatgggatcttgtttaagaattgggttgctaaatgaagtaaaggtttttgtaataattttgttccgcggatccagtttttagcaggtgagaaagtatgcatccaagtgatcacaccagcaacgtgatcattgtagttagcttctttcatcacttttgtaatgttatcagcagttgttgcgactaatttgaaaacgattgggtaaggtaattggtgactcgcatttaatttttcaacgatttccttagcatctttttcaactgagcgaagggtttcttcgccgtataatgattgactccctgtgacaaaccaaaattcataattttctgtgtttaacatgataaagactccttttttaacgtgctttttgaaactgactcttgcgcttaatgacatttgtcaaatcagcgattccatcgctaattcgccaaattaagttaatgctcagagtcaactcgtttcaaacgcactcctttttttaatgtatttttcaaactaatcacttttgacgtacttcttttttaacgtgcttttcaaaccatcctcctgtggctagctacgtcccgcaaacgatcgactttgtcgctcattcacgggactaggctagtcctcgaaggatacccggttttaacgcacttctttttttgcatgaccttgtgattgggcgttattttgaccgtagtaggcatttttgccatgcttgcggtaataatgtttgtccaacaagaattgtggtacggcactgttattgcgtgtcaattgaagggcgtggtaatccatttcggccaccacttctaagactttagcgttataaacagctttgtctggtgtggcaccccaagtgaaaggtccgtgttggcgaacaaggaccgctggaacggcttcaggatcaatgccctgttccttgaaggttttcacgatgaccttgcccgtattttcttcgtaatcattttcgatttcggcttgtgttaaagcttcagaaactgggacatccccgtaaaaagtatccgcgtgtgtcgtgccaagtgcgggcaccggaataccggcttcggcaaatgaaacggcccaaggtgaatgcgtatgcacaatgccaccgatttctggaaattcattgtataaaacggtatgcgttggcgtatcactagaaggattcatattgccttcaacgacttcgccttttaagttcacgacaatcatgtcgcttggttttaagtcttcgtaatcaacaccagaaggtttgatgacaaacaagcctttttcgcggtcaattccggaaacattaccccaagtaaaagtgactaggtctagtttaggtaggcgcatattggcgtcatacacttcttgttttagtttttctaacatgctttaatcctcacttctcatctttaatcgcagcaattgccgcactttcaattggtaaccctgcttggtaggcctcaataaaggtttgataaccagccacacccgcggcttctggactgagcgtcatgctttctggattcgtaaagacgttgtaatccaagaaatcatcgagcgtttgaccattattatcagcggcaaacattgctaagacagccatgccccaaggaccaccctcaccggcattactcataaccgtaatcggtgtgtttaaagcattcgctaagacttgttgtccaacgacgggagttttgaacaatccaccctgggcaatcatgacatccgtcttgatttgttcttccttcaccaagatatccatcccaattttaagcggtgcaaaggctgcatataattgggtttgaataaagttaggtaagttgaagtggctatgcggttgtctgacaaataatgggcgaccagccggcattttagtgacattttcaccggataagtagctgtaattaatcaaaccacctgcgtcttgatcggcatgggttgcttctaagaacaacgtttcgtataaccgatcaggcgctaatgacactcccaagcgtgctgcaaattcattgaataaattagcccaagcattgatatctgacgaacaattatttgtgtggaccatcgcaactggtgagccatcaggggtcatcaccatatcaatatcgcgatgcacttggttgagccggttggtctaacaccaccattgaaaaggctgacgtcccgactgagatattcccagtccgtttgcggacgctgttagtgccgaccattccggttccggcatccccttcaggcggtgccatcaagctgctcgctgtcaaattaccgcttggatctaacaattgcgcgccggctgacgttaattggccagcagcgtgtcccgctggcaagaccgctggtaaaatatcggctaactgccaaggttgttgttgaacgcgcttgatttgatcgaattgtgcgactaactgagcatcataactacccgtttggggatcaattgggaagacaccggatgcgtcgccaatcccgaggactttttcacctgataattgccagtggacataacccgctaaggtagtcatgaaagccacttggctgacgtgtgcttcgtcatttaagatggcttggtataaatgggcaatgctccatcgttgtggaatattgaaattaaattgttcggttaattcatcagccacttattccgtgatgttgttgcgccacgttctaaaaggcaccaacaattgatcgtccttagaaaaggcgagataaccatgcatcatcgcgctgacaccgatacttttaatcgtggtaatcggttcgtgatacttactttggacttccgcagccatttgcatatagctcgcttgaatcccggtccaaaccgcatcaattggatacgtccagacgccatcttctaattggttttcccaaacaaaactccctgacgcaatggtttgaaaatcttgcgctactaaaacggctttaatccgtgtggagcctaattcgatccctaatgagacctgaccggatttgatggcttgtgctgcttcaattaaattcatcatcatctttcctctctgacacttatgctttatgcgccttgtttgtgccttgcgcttcaatttcttctaatgtgtgacccattgtttcagggacacaagttctaatgaagaggacacccagtaaacaaatgacaccgaaaatggcgaagacctcttcttgtggcatggatgcgatcatcattgggaagagtaacccaactaagaatgagccaatccagttgaatgatgaggctaagccagatgctttaccccgaatagctagtgggaagatttcaccgactaaaacccatgtcagtggtgcccaagtaaaggcgtaaaaggccacatagagacataagaaaacgacaatcatcattgggttaaagttgggaatcagtgcattcatgatggctggtaaaataaatgacaagcccatcacggtcccaccaagtgttaacaacgtccgccgtttaaacttatcggcgatgactaagaataaaagtgaacctaaaactaagatgaccccttgaataatcggccacatcagtgctgaactagcggctttgcccgttgccttttccacaatcaatggaatgtagtagaaaatggcattagcgccttggaattgttgaaatccagcaaccccaatccccgcaatcacgagatatcgatatttaccacttaaaaacgttttcatcgaagtgctttgttgaacgttactttccatgccggccgtcgtctggatattcgttaattcagtttcgacctcgtcttttgaacggatataaccaaggacttgccgtgcttcatctaatcgattgtgtttcaccaagaaccgtggggattctggtaaccgtaaaaccccgaaatacaaaataatggctggtactgcggcaaggcctaacattaagcgccatgctaattgttcaggcaaaccttttaataaataatccacaatgtaagataacaacatccctgaaacaatcatcgtttgattaatcccagtgagtcggcctcttagtctagctggtgccatttcagacatatatgccggtactaaggcggatactgccccgactgctaatcctaagaagacacggacggcgattaagtagacctgtccgtcgtttggcgagaatgctgatagtaatgagccaattgcaaaaatcaaagatgataacaaaatcatcttccgacgaccccatttatctgataactgtccagcaagtgcgccaccgaaaatggcaccaaacattactgccgatgtaatccagccaacaaccccagcattattctctaaatgccagtcgtgttgtagaaagggtaacgcccccgtcattacgccaatatcgtaaccaaactagatcccaccaaatgagccaaagcagtaaataaagctacttggaatttttttagcctgcgtcatgcttttttcctccatctttttttaagtctatttaacgtactttttaaatgaccgtttcactttataaaacggtttcaacttgtcgacaaattcagtctataactttcattcgaataaataaatataattatttttgattcgaaccaatatgagtaagcgtcatcattttaaaccgcatgttattaggcttttgctgttatataatttttttaaattaattggccaccattttatttattcgaataattatggaaactaaaaaaggggctatcgtcagatagccccttttgagatacgtccttatttaacttttccggcagagttccgtttaattaatggtggttggtataggatcgattcaaccggtttatcctgaatcatgtctaagaccatttggcctgcatcctcacccatcttcgtcttattatggttgagtgttgtcagactaggactaatataccgtgacatttgataatcatcaaaaccaacgactgaaatatccgccggtacttttaagccttttgatttcagaaaatcaataacccgaattgcgagttgatcattgtaacaaacaattgccgtcggtacttctgaaccttgtaaataatccgccacacgtttcaatactttctcgaaactgtcgcctgattgatacataattaaattactcttatacgcaattgcaggttgttgttggtaagcttgaataaagccattcatccggtgaacgccttgcagatccccgacttggaaaatacctaaaatcgcttcatgaccgagttcaaagaggtaattaaccatctctttttccgcttctaaatcatcatttgtaatgacgggaaaatccaattctgggtaggaagcattgataaagagcgttggaatttgatcgtcttgaatctcgtggtataaatccatattcggatttttaagcgcactttgtgtgggttcaataatcaaaccagcaaccttattatcaagcatattaatcagactcttacgctctttttcatgatcattatgcgtattgctaatcagaattgaatagcctttttcagaaagtacccgatcaatacctgagataatacttgggaaaatatagtccgcaatatgcgttgtgatgatcccaatgaccttgctatcagcatcattcgtccattcgcgatgccagtcttggacaaacatccccccgccttgaatccgattgatgaaatgttcttcttctaaatcaccgaccgctcggcgaatggtataccgtgaaacatcgtattgtgccatcaattccgtttcagttggtagtttagcgccaattgaatattgacccgaaataatggcttcttttagcgcttcttttacttttttaaatttattttgcatggctttactccaccaatcaattttaaattgattcgaaactgattgctaattgatgtgatttttaataatttatttgaacacttctagcatagcaaagtttgtcttattttccaatccgtaaacccgctttattaaaaaaagacgctgcagacaacatttcttttgtctacagcgccttcttatgcttatttcttcaaattcaatcctgccggttgttggtcggctggtgtgttgtctgccaatacttgatcatgcgctactgttccggcgtaaatgtcgtccgttaaaacgttgcgacggtgtttgataacccggtaaacatgtaacactagtactgccacgttaatggcaagggccaatgcgctgaccgtcatcaaagcagcgctactatgcgtactttggacagagaattgtgagtccgtcacaaaagcgggataactcatcgtaaacatcatccaaaaagccaatgtttgtgcacgtgcttgtaaccaactgccttttttcacaaagaaagcggctaacgtacatgaaatcaataaagccgcgcctgcgtagaatgagtgatcgccaacactgttataaacgtaggcgaagttccaaacatcataggcgataatccaaggccagatcatgtctttttgtttgtcgtggctgatgataatcccaaaccaccctgaaatcgtaatgatattgatgattccggcaatcccgttcatgatgttccaagcgccaccattcatgacaacgccgtccactaaaccgtgtaagccagccacttggaagtcacggataacggcttccataatgttgaaggccaagatagccggtgggaaaatcaatgcccacttattgtgttgcaatttagggctaaagcgcaacgccataaagcctaaacacccggccaacgctgagtaaactttaacccagtggaaccatgtcccagtactactatcaggtccggccgtcgttggccaaacaaaaatcgttaaaataacaggtagtccgacaaataataataatgctacccatttgttagcccgtgcggcttcgtttaacagcattaaagctgcaacgaccccaatccaaacgagccaatcaatccccgcaatattttgaaataacatataaacccctcctagaaataatagctgtttctatacttctactgtaatcagttccgttgtttttcgatatggttattccggggtgtttgtccaaatttagcgattattatccaacacttgttgcaaagtcccatttagcatccggtgcatccgctgatagaattcaactttcgattcttgcaggttggtcaccaaccattgaataatctgcgtcgcgagcgcccaaccataaaagttggccatttcatcgcgcaaagtcggtgggcaatccggttgcaggtcatcaacgacaccggtgaccatgttaaacgcaacgcggtataaaaagcggcccaataaatcatgattcggggagtgaaatgtatttaaacaaaaatgacgattggtttcaatataacgcaatagcaaatccaatcctttggcccaatcctgttctttttggcaggacgccagttgggagacaatctcgcggttataaatccacgcgaccaattcattaatatcggcaaaatggtaataaaaggtgttgcgcgcgacgttcgcctgctgcgtcaactgattgacagtgatgtgatcgaccggcgtcgttgccattagtaatttcagattttgggccaaattttgtttggtatccatcccaaataacctccacttgatagttacctttagcatcccatatcaaccaagcgattgcaatccagattagtggtgaatcagttgcatgaccgaccgagcgattggttgggcgataaacgcttcaacgatgaaagctaaggcaaaattacgcggccatttcgcgccaaaatgggtaatcggcgccattgaaacctgaccactgccaatccaagtgccaatcgccgttagaaaaatggacattaaaaagacgttacacaacgccgtaattaacatctgtgcttgaaagctatcggtctttgccatgagatgactggccaagtattcggctggcttttgggtcaataccactaatacaacgacggccacccagataaacggaatcactcgtagcgtggcttgccacatttgccacgaaaaaccaatctcaaagccagtgatcaacggagcaattagattgacggataaaattgaaatcaccgcgataaacagcagtgtttccttaaagttttgtggtaatcttttaacaaataacatgaatattctccttaaatgggcataaaaaaaacagcacaaagtagggtattcctactttgtgctgatcaattatacgcacgtttttttgattaagattaattgtagcaaactttcaaaaaccgcgctaatgttatttgcacttttcagacgattgttttatcgtaaagctatcatgatttacgtaaaggagaattgcaaatgacagtcacaaacgatgctgcttttacagcaatgaccaacggcgaatggtacttcgattcagaagcaacggttcaacaacgtaacgaaacacgcttggcgctacaaaagaccggccaaatcttagataacgcgactcggatggccaccatccaaaaattactcggccacactggtagcgactttttcatcgaaaccggttttgaatttagcttcggccaaaatatttcggtcggcgaccatttttatgctaatcgcaacgttttaatctgtgatgaaggccgcgttacaatcggcgatagctgtaaattcggtccgggtgtgtcacttttaaccccttatcacccacttgatccaacagaacgcgccactaaaaaagaaatctctggcgccattacgattggcgaccacgtctggctaggcgctaacgtcactatcttaccaggtgtaagcctcggcaataacgtcgttgtcggcgccggcagtgtcgtgacaaaatcatatccggataacgtgattttggttggcaatcccgcacgcgtcttgcgagaaattcctgctaaataataaaaaaggactgacaaatgtcagtccttttttaggcttcaattgaatagtattcaataatcgcttttaaagctgctgccgcttccgaattgcccactaatttcgtatagtaagccgcaaaatgttgatccgcctcttgcttggcttgttcaccataatttgccatcacttcttgcccatagcgttgatcattttcagcgattgcttgttgtttgaactgttcgaatttagtttggtctgtcatttgagaacctccagtttgattttgaagggtggcatctaactgcgccaaagtcgccgtcaacactgcttgttgcttggcaagttcatcccgtttagccgctaagtgtgtcagccgttctgctggcggtaacgccaataactgctgaatctctgccaagctaaactgtaatcgccggtacatcaagattaactgtagccgatccgcatcctgactcgaatagcttcgataaccattactagcaaccgccggcaccaataacccacgctcgtgataataccgcagcgtgcgctcagaaacaccggtcaattcagcgaaagctttaatctgataattcattgccatccctccttcaaaacccactataaggcctgacgtggcgtgagggtcaagcgccgtttatcatttgttgattattttttgctcaaccaagaaatcatgcgccacatcacgcgctttacggtgtttaacttgaacctggtagttcatctgttgcatctgatcttcagtaatcttcccggctaacttgttgagcgctttgacgacttctggatgggcctttttgaagctctccttcataatcggtgcgccttgataaggtgggaagaagtgccgatcgtcttttaaaacgaccaacttgtaacgcgccacttccgcatcggtggtataaccgtcgaccacatcgaccttgccatccgcaatcgccttgtaccggatgctaggttccataattttagcgtctagttgcaattgatacgtcttcttcaagccttgatagccatctttttgatgataaaagtccgggtcaaagccggccgtaaacgattggttcaaggccgctaaatccgaaatcgttttgacgttatatttcttggcaaaggccgcactgacagccaagtcataaccattttgatagcgcattggtggtaagtatgtcatcttgaattgttcttggagcgattttttagcgagttggtacgttttagttggattctggttggtcttggttggcgatttcaccagcgtctgtaagaccgtacccgtaaattctggatagatatcaatttgatcggccttcaacgcgttaaataagaaggtcgtgccaccaaaatccggtttaaccgtcacatcatattgcggatgatcggccaaaatcagatcacgatacatattcattaagatttcgggttcactgcctaacttgccggcaatcgtaattttagttggtgccgcttggaaccgtgtcacaccttctacgagaccaaaaagccccacaaaaatggccaagctaatcgtaatctttttgaacgataatgtccccaaccagcgaatcagcgcgctaaccactaacgccaaaacagccgagagcgttgccccgactactaacagggcgttattattcgactgaatcccaaccaggataaaggtccctagaccgcccgcgccaatcagggccgccaaagttgccgtcccaataatcatcaccagcgcaatccgcagacccgaaataatcaacggcatcgccaatggtagctcgatgcgcaacaaacgcttcgcacgtggtaagccaaaagcaatctccgcttcttttaacgccggatcaatcccgctgagtcccgcgtatgtattttgaaaaatcggcatcaatgcgtacaagactaacgtgatcactgccggcaccgtgccaatccccactagcggaatcaataatcctaagagcgccaacgacggaatcgtctgcagaacacttgtcacttgtaacatcgcttcggcgagtttttggtgcgcggttaaaataatcgcaagcggaatcccaatgaccgccgcaattaagagcgccagtaatgagatttccagatgttggccgagcgcttgcaataattcgcccgattgagtcgttaaaatctgctgaatctgttgaatcatcattaaagcccccgtttcgcaatgagcgtcgttaaatcagtcgtcgtcaattgccgttgtgtttggtcatcaagtgccacgatgaccccttcaggttgcgcgattaagtcttgggccaaggccttgatggatgctgtcatggtaatcgtttccggttgcccgctaacaacggtccccaaatcagcggccactaaatcttgcaccgtcaatgtcgttggttggcgttcaatatcgaaaaattcacggacaaagtcgtttttcggttggttaaaaatcgcttcggccgttccaatttgttgaatactacccgcccgcatcaccgcaatttcatcccctaaacgcagtgcttctttcatgtcatgggtcacaaaaacaaccgtattatgcaattgcttttgcagatccaatacgagatcttgcaattgcgtgcgcgtcacagggtcgagcgcactaaacggttcatccattaaaatcactttcggtttggtcgccagcgcccgaataatcccaattcgctgttgttggcccccagagagttcactaggatagcggttggcgtatttatctggatccagattaaccagcgttaacagctcccgagcgcgcttttggcgatcagctttagaccactccaaaacttcaagttgaatagtaatattttcttcgattgttaaatgcggaaaaagggcgatattttgcaaaacatagccaatgttaagtcggagggtctgcaaatccatttggtcaattggttgaccatcaattttaatcgtcccactagttggttcaatcaaccggttgatcattttgaccgaggtcgttttcccgctaccactagggccgaccaagacaaatagaccattgtctggaatggttaatgttagaccatctaacgcgcggctttgcccgtattgtttggtgacaccttcaaattcaatcatgcgctactccttttgccacttaacgatttgttagttcattgtaccacttagaagaaggccaaccaattgacgtgcttgggcccgtcaatcttatttttttgattcacttttgcactgtgctacgatgaagccaaagcaatcaattgaggagggtttaatatgaaaacacattttgacaccatcgtgatcggtggcggccctggcggcttagcggcggcttatcgtttggcggaacagcagtccgttttagtcgtcgaaaatgatttatggggcggcacctgtcccaatcgcggctgcgaccctaaaaagatgctctactcggctgttgaagccatcgaccaccagcacgccctgcaatctagtggtttagtcggtaccagttacatcaactggccccaactcatggctttcaagcgccaatacaccactcaaattccggacggcactttaaacggtctgcaaagcgctggcattcgaacagtaaccggcaccgctcactttatcgccgaccaccacttgcgcgtcggtgaaacggattatacggccgaccacttcatcatcgcaaccggtcagaccccaacgctccccgcaattgaaggacgcgatcttttacagaccagcaatcaatttttagacctggatcacctccctgctaaaatagccttcatcggtgccggttatatcgccatcgaattagcgaatatcgccgccacagcgggcgctgaagtccacatcattcaacataacaagcggattttacgcgatttcccagaagccatgacgaccgaattaattacgagcctcgaaaataagggcgttcagttccatttcgaaacaacggtcaccaaagtccatgagaccaccaaaggcctcgtgctaaacaacgcagagggcttcacactaaccgtggatgccgcttttgccgcactcgggcgccacgcgaatatcgatcaactcaacttgcccgcagtggacgttgccattggccaccacggtattcaagtagacgatcatttagtcagcagtaacccgcgggtctacgctattggcgatgtcgttgatcggccccagcctaaattgacgccagtcgccggctttgaagggcgctatgtagccaatcaacttctccaaaccaattcagaccccattgcgtatccgctcattccacacacggtttacgctagcccccagatttcacaagccggtgtttctgttcaaacggcgcaagaaaaccccgaccaatatcgacttaaccaacaaacaaccactaattggtacaccttcaaccggattaaggaaccaaacgccatcgtgaccacgatttttgaccgccaaaccaaccaactcgtcggcgcggcagcctacaccacgattgccgaagagttgatcaattatttgacgcccctcattaaaaatcacacgaccgcggctgaactcaccgatacaatctacaactacccaagtcccgccagtgatttgaaatattactactaaaaaagtgttgaagaccgattgggccttcaacacttttttaaataacattttcttttttcgcttttccctgtaaccatagattaaaggcgagcacaatcaccaagagcactgtcgcaatcaacataatattgtgtaagccttggtacataatcgcgcgcatcgccggtaagaggtgcgctggcaattcatgcacgcgttggaggttgctcaacttgttcatcatcgccatcgtgatttgaccgtgtgatttggcaatcccttgcgttaaagcatggttcaaaatcacgccgtaaatcgacgacatgaacgtttgactcagaatccgtaagagataggcaaaggaggtcgcaatgggcacatcgcgcgtctcagcgtcttcttggacactaatttgcaagacgttaaagctcatcccaagtccaaacccttcaaaagcgcccatcaataataaaaaccaaaatggtgcccgatcgcccatcattaacatcccactaaaggcgattaaaaaagcaaccgtccctaatgttaccacgcggtgtttccctaagcgcggttgaactgccggcccagccagcgaaccaatcaagttggtgaccgcgcctggaatttgcgtcatcccgccgagtaacgcactcaagcctaataacccttgcgcccacattggaatatagatgttaaacgcgataaatgcgccccataaaacgacgaataagataaaatcagtcaccaattgcggatttttaaacaaccggttcggtacgattggatcggccgcgcgatcttccactcggtataagacaactaacaaggccagacctgcgacgattaacccaataatcaaggtcaatgagccggtcccaatcatttgaatcccggtcaataacgtcaccaaactggtaatcataatgccggcgcccaagtaatcgacgctaccacttagatgtgccttaggttgttctttgaagaaataacgtacgcagagaatggataccaatgcgattggcacgttgatgtaaaagacccagtgccaactaaaggtatcaacaatccacccaccaatcaatggcccaacaatcgaagccgcactataactcgcggtcgcgtacccgataacttgcgcccgcttgcgcaaatcttggtataaatcagcataaatgatgaatggcaaggtgttcatcccaccagcgccaatccccataacggttctagcaatcaagaagaaaacgatgtttccagaaaccgcctgaaaaattgaactgaccgcaaacaataacgttgccaattggtaggcccgtcgattgccgatgtgttcacccaacttactccataaaggtgtggccaccgccatccccaacaagaagaccgccacaatccagcccatatattgaatcccgtgcaaatcactaatgattgctggcaaggccgtattgatgattgtcccatcaagccccgccatcatatttgataataataatgccagtgttactaaaagtgtattcttcttattcactatcaacttactccgtattttctgtttttacttattatagtataagctatctcaattaacgaccttccttcagccgctcaaccacttttattatcatacaccttcaagttgacttgaaggcaaacaaaaaaggccccctttcagagtcctttttcaatcagctacaatgccgtatgggcttcaattatttgccgcacctttttccgttccttttcaaagcgccagtgaccgttcatcccagaatagtgcattaattggctgagataatagcctgctggtaaattaccttctagggccttataaaccttgctgcctaaagcaattaaggtggctgattgtggaatgccaaggtccttcaagtgatcgagtaaggctgttacattggcctggcccactttaaccttgctggagtcactttctagtgacccttctaaatccgtgatgaaaccaccccatgcatcagtaccgtaagtaatggctgctagtcgataatcacaacttttgcgatcaccgtggaagtttccgaataattctggtagtgggcccgcatcgcctgggttcaatccgataaagacgtattgcaccgtactcaatttttggtctaaggttgctttatcaatgtcattcgggaaaccgggttcataattttctttgaataacggtaaaattgattcttccggcgttgcgtcggtcaagtcgcttggaattgaccagtataaccaactatcaacggctgtatattttgtcatttagcatcacgctcactttctataataattataaaaaatgattgcgacacaatatgtcacttcgaaccgtttttgagattttgagttaaagattttcgcgcgccgctatcatctgttcgataaattgcgcaatagtctcaacttcggcttcggagtagttggctaaaacagcttcatagttttggcgttgccgttgatgtaattgttggtgaagctcaccgatttcttgcccgcgagccgtaattctcagtacgacagctttttgattttccggcgtgtgaaatttttcgaccaaccgattcttagcgaggcgctgaatatagcgcgataacattccttgcgacaattcggattgcgcctgtagctgcttgaagggaattgcttcgcccgcctgtgccagttgcgtcaaaattgccaattccgaatgcgttagtttcttggcttgagccatcatctccggtgttttattagcctgtaaatgctgtaataaccaatcccgctcaggatcttgatcattttcagcgtgtaatttggcgatcatttcttggagctttgctaatttagacatttttaattacctgtaatatatctgttgactttcattaatttaggatctatactaattttacattacaggtaattaaaaaacaagaatctctcatttttacaattaaccgggtcattttcaccctaataaattaccggtaattaatcttataaaaaaagagttttttaatatgaaagcagcagtcgtaacagattttaaacaagatcctaaatttgataaccaatttccaacaccaattcctaacccagatgaagtcctcattaacgtgattgcctcatccctttccaatcgggcgcgctccggagcagccggcagccactacacatcgacggaccaactaccagtgattcccggtgtcgatggcattggcactttaccaaccggcgaacaagtttatttcgccagcgaaggtacttttgctgaacaagtcgccgtcaaaaaaggccactgggtaacagttcccgatggccttgatgcaattaaattagcgggcatgatgaatcccgcgctttcttcttggatggccctaaactaccgtgccaattttagtgccggtcaaaaagtcatgatcctgggcgctaccggtaacgccggtatgatggccgttcagattgccaaacgcttaggcgcttcagaaattatcgccgtcgcccgcaatacagagaaactcaagacactgaccgacttaggcgctacacaactggtcgatctctctgcagaacccgcacaacgcaatgctcaactcgctaaagccggcagtgacgttgatatcgtccttgattatctttggggcgacgttgcagcaaacgccatgaccgccatcatcccccaccgtcaaaatgccgaacaacttttgcaatgggttgaaatcggctcatctgccggccaaaccgcacctattccaggggctgccttccgcgctgtcgctttgagcttaatcggctctggtcagggttcagttgcgcctatcaatatgatgaaatcattgaacgccattttaaccgctgaaaaagaacaaccttttacttttacaactcggacactaccattatcagatgttgaagctggctggcaccttcctggcaatgaacgcctcgttttcactatctagtcggtccctcgcaccacagcatcgcgccgcatacgaattccgtattccgccaagccaatcacaaccgcaatcgtcaacagaatgaggagactcttccaatcttgtttcaagattaatagatcccccgcaaaggcgtaaataaaagcaacgatcgtcgaaccggctaaacaagcccagctttgtgctttagccgttagctgcgtatcaccggcggctagattcacaaaagcagttggaatcattggtactgcataaccaatcaagacgccccaatgccctaggcaaaccccgacaagcatcgcgactgctgacgtcggcgcgccagggatcactgtcatcacgaccatcactaagccaaacaccaagaacgcatacggccccagatggcgaatatccaacacatattgccgataatcctgccactgcgctaaaaaagcaatgaccgtcctctgatggcgccaaccaatcaataaaacaatcagcgctagtaagatgatacttactgccagtatcagccgtttttgttggtgcgccgtcatccgatgacaccttcttttaagtaatgctcaatcgtcgtcaagacaccatcgtgattatgatccgctaacgcaatgttagcggattgtttttttatcgactcataggcattaggcatcgcaaagccccaaggcgtcatcgtcagcatccccaaatcattttcattatccccaaaagtcatcaattcatcatcggtaatttggtaacgcgtctgtaattgacgtagaccgctcaccttatccacaccaacattaccaatcaactccgtttgaaatcccgaattctgactcatcaaacctgccggtaaggagccccgtaactgctggaccgcctgtgaataatcaacatccggcccaaacgtgatcccgactttagtaatttgatcgttgactgagcgccccgtcaactgatcaaaatgatcgaccaacgtcaccgcatggtaatactgtttaatgattgctagtgtttcaggtgaagcctgccgcggcacatacgtttgagccaacccagaaattgttttttgcacaattatccccgctggaaagcccttcgcaattaacgctaataacgcttgtaaatcatcatcagccaatgcgtctactcgcagtaaatcatcaccatgatgcacaatcgccccattttgagaaatgaaatctaacgactgacgatacggatcaaattgattttgcagccgttgatattgcgacccactagcgaccacaaacttaacttggcgtgcttgtaacgcctgaaaaactcgcgcaaaccgcgcctgattatattgattattctggtccaaaaaagtcccatccatatcaacaacgatcattttaacacccatgatgaaaacctcacttttattcaaagtcacttattctaatctctttagtataaacaatcatagataaacacaaaagatgtatttaagtaatgataaaaatactaccatacttaagacaacaaaaaaggctgaaccctaaggttcaacctttttaattt
